United States Patent Application Publication US 2015/0086982 A1 - sequence listing, part 9

SEQ ID NO: 118 - DNA, 2452883 bp, Schizosaccharomyces pombe
  misc_feature (544)..(544): n is a, c, g, or t
  misc_feature (123340)..(123340): n is a, c, g, or t
  misc_feature (1083349)..(1083448): n is a, c, g, or t
gatcagccaaaatggctgatccagctatttagcaggttaaggtctcgttcgttatcgcaattaagcagacaaatcactccaccaactaagaacggccatgcaccaccacccatagaatcaagaaagagctctcaatctgtcaatccttactatgtctggacctggtgagtttccccgtgttgagtcaaattaagccgcaggctccactccattgtggtgcccttccgtcaattcctttaagtttcagccttgcgaccatactccccccggaacccaaagactttgatttctcgtaaggtgccgagcaagtcgataaatgaaacattgcccgatccctagtcggcatagtttatggttaagactacgacggtatctgatcgtcttcgatcccctaactttcgttcttgattaatgaaaacatccttggcaaatgctttcgcagtagttcgtcttcaataaatccaagaatttcacctctgacaattgaatacgaatgcccccgactatccctattaatcattacggcggtcctagaaaccaacanaatagaaccacacgtcctattttattattccatgctaatgtattcgagcaaaacttgcctgctttgaacactctaattttttcaaggtaaaagtcctggttccctaccacgctcaataaagaacatgagtagtttgccagaaggttaacgaccccggtcatgaccagtaaacacgccttgcggcggaccagtcgaccaggctcaaagttcaactacgagctttttaactgcaacaactttaatatacgctattggagctggaattaccgcggctgctggcaccagacttgccctccaattgttcctcgttaaggtatttacattgtactcattccaattacaagacccgaaagggccctgcattgttatttcttgtcactacctccccgtgtcgggattgggtaatttgcgcgcctgctgccttccttggatgtggtagccgtttctcaggctccctctccggaatcgaaccctaattccccgttacccgttaaaaccatggtaggcctctatcctaccatcgaaagttgatagggcagaaatttgaatgaaccatcgccggcgcaaggccatgcgattcgaaaagttattatgactcaccaaaaaaagcccgaaggcattggttttttatctaataaatacatcccttccaaaaaagtcgggatttttagcatgtattagctctagaattaccacggttatccaagtagttgaggtactatcaaataaacgataactgatttaatgagccattcgcagtttcacagtacaaaattgcttatacttagacatgcatggcttaatctttgagacaagcatatgactactggcaggatcaaccaggtaactatcgttagaggtgagacaaaaagcagaaaagaagaagataaaaaaatgtttttttttaaaacttctttttacttttcacacaccactaccgtttttaattttttttcttcccaacaaaatcaggaagaaaaaaacaaaaacaaaagttactcaaaggtgaaactgaaaaaaaaaaaaagagaaaagaaaataaattcttcctaaattttttttttacaatttcccattattcctcaattaaaaaattaattttatatgaggttgtctagagatgaacaacatttcctagttctcttttaaagaacaccggatatatcgtttctctgaagacaaggaaattgccagcttggtatcataatttcctcagattttagcattccaacaaataaacattgtttccaaaatatcatataaatagataaaattgtactccatgtcaaagttgaaaatcaaaatcttcagaagtggttcaaacgaaatcaaaccacatagtttttaataaaaaaaaactacggctgttgatctgttgttaccactaaatgactttttcagttcaaatgttagtcgaatgaccatacatccacagaaaaaactcatcgagtctccacaagacttcctctttccattttgcaatggattcgtgaagcgcggattctccagcaggaaaagagaaaagaaaaaatccttcaactctcctttcaaatctgctaaaggatagctaaaaagtcggagtcaagcaccgtcacgtagacaactgcaactcgctttccaacttatccttgcggtatcaaggtaccgggtttgggggaaattacaaattttaaaaaaccgattttacaaaaaagatgaaacaaaaaaaaagtttccaaagagaaagtctccttttccacttctttttccccttcttctcgttcaaccttttttctaaaaatgtaatttttaataagaaaaagaaaagtatgaaaaaacttgacggaccttcttttcattcttctggacaatcaaagaccgttacaaagcaaacaaaaataaaatagtaaaattctatctttctttccaatgcaccgcgatgccaacacaaagagaagaatcaaaacaatttccattttcccattttttcaattcttagcaaaaggagattagcaagtctttacgaaagttgaaaaaaaaaattccaaatccaaaaaaaaaaataaataaaaagttccaaaagctattaaaaactctttttcctcttttcttttttttttcttttcatcttcttttttcttttctcctttcaaccaccactccttttacatagttccttggacctatttttcctcgattttatagaaacatttgtggttgtgtgaatttcgtccatttcggtgcctatttcctatcctttcttccatatccctcctctctccaccaaaagtcctactactaccaccagaaaactatccaccacacaaaatcccactactccctccttacttctccttattcaacgttcaaatacaaacgaaaagaaaaagaaaaacaccatacgaaaatctctttattctttatttgtttgttgaaaccccttttttcttttttcatctttcgtatcttttcccttttttcctcttattttatcttttctttcttttcttttttttatttgtattgattcttatttctctcattttccattgaaccatactccattccctacctacaactaccccttcccacacccatctctgactctaccgaccctgaaaaatttaaagtcccacccctctccacctactctattccgtttttttcatattaaaattggcttttcaataaatattgttttgttaaattataaattaaatttttctttattttttcataaatttttcatttccattttcttttgtttttcatgctttcctcacatgttttgtatcgaaaaatttgcatttttatgttccatcccatatttcgcacgattttcaatacctttgtagttgtttttttgttttcttattttttcttttatttgtttgcactttttttgttttttccattttgtttttgaaaaatgttgggaatgtgtagtgtattatgtttatgttattttgtaaatacttgaatgtcatgaaaatcgaaaattacaaagttggtcaaccaagctcattttcattataaaacattacttttggttaaattatataaaatgtatttatttattttgtaaaaatcctacaaattaccttgtttttttcattttttctctccaccttcccataacatgccccacccttccccaaggaaaacacactctaaatgcattttttttgcactctggcttcagctacatggatgtttattactcaaaattgtaaaagaaatgcatctcatctatttcctctaaattatctattttcttcctccatacaactacctctactccctctttcacttttcaacttttgacccatttgcctgtcgatctttttcattcttgtaaattcacagaacaaaaccaaacacttgagcctcatgatgtgttcaacacgtgataaaggacctatcgaatttcgtaaagatgaaaattttcctttcgaatgactgtttttgcattccagccttctccatttcaccaccagactcatctttacacccgcttcatcagtcttagacaagtaacatcgttactttttgccagatccagccacgcatacctgacctaaatgtggtttgatgaaaaaaatttttttttgtttcttttgaaaatgttggatattgtgcatatgtaaccgcaccaaaattttccacatatttggtcaagaaattgaacattcttctacgtcatgtttggtgatattttggggttctataccagccattttcgatgtttcttttgttgtttgaaaaaaataaaaataaaaataaaaataataaataaaaggtgggttcattaagaatacaaataaaaacaacaataaataaataataaagaaaaaccattacagttacagatttcaaaagtaaaaacataacaacattggatcccttttccacccgttatttcctcacaaaatacatattgttactctcaatccatccatcaaactttatactatttttaaaaataaattaacctcgtgataattttgtccattttccacatttggaaacaactttctgtttttatgttactacactactatatattatgtactttttcatccgtgttaaagtaaccaccattccatcatgatatcctcattatcaccatatccatatccaatgtaaccgtaaccatgaaaaatatgacacaccaaaaaaaaaggaaacccaacctgttgtaaccaattttttttttttttttttttttttttttacacttttaaccacatttaccaaccttatactctctctctctatctctcacacacaagtaaccatgtaaccaaccctaataatcaatacaaatgtaaccctcattaaaaatattacaaaacataaataaatattacaaaacataatatatatctattatatctattttcttttcttttcttttctcttattggtctttttttttttaaaactatatgctattgttcttttaacgtacttttaactttgtttatcttgtttctgctttattctaatttatcattttcctttttttttttactgttctaaactactttgcgtactttttttttactttaccgtcttttattattttaacacgcttggtttgtttgtaaaactgttattcattcttaagctttttaaaatctatgacattacgttaaacttcaataatgaattcttctttcacatctccttccaatgtccaaaaatgttctcctcagtaaataatggttagcgtgtgtgtgtgtgtgtgtgttgtgcgcatttgtttacaaatggaacttgaaatttgaaaagggggaaccaccaagatagctccttgcactgcgttaaatccctctcctattttgacaattccaactcaccaactcattttcaaggtctttttttttttttttttttacgattcacgacctaccttaccacttatcttacctacctacctactactacctaccatacctactacctatgaactacttactactactactacctacaaaaaaaaaaactttggttgaatattttttttactaggatttgtgcattacccttacctcttttcccttcaaaaagtttttacttttccacaaaattgggtattgggtattgagtattttcccaccaattcctaatactaatactactactactactaataccccccctactacaaaaaaaagttgtctgcgtgtgtggactttgaatttattttttcttcaaaagtgcattacccttaccttttatctcttcaaaatatttcaaaggtataaatatactatatactctttatatatattatagggaaaaagttcagaccaaaaaaaaaatcgactcgctcgactttttcttctctctccctcttcttcccccttcccccttcctcctctcctccttcttcttcttcatctcttctttctttctttcctccaatttttctcttcgaattagcaagtctttaattttttgcctaccaacaagaagagaaaaatgaaagaaataagatgatggttccttaatggaacaaatcttgggaacaaaggcttaatctcagcagatcgtaacaacaaggctactctactgcttacaataccccgttccacattaaagtcgtatgcaatggattcgattccgcacaagatttcaatggaatttcatggacaagtcaataaaacacttccgtttcatcaaccatcgcccatcttctacgatacaggagagtaggaacaagtcctacctctatttttatacatataaatcatgcggaccaaaaaatcgtcgctttctggcacggattctggcttagaggcgttcagccgttatccggcagatgatagctccgcggcattgccttgtcaggcagccgcaaataccaatgatctgaatcaacggttcctctcgtactaagttgaattaccattgcgacgacacttcatcagtagggtaaaactaacctgtctcacgacggtctaaacccagctcacgttccctattagtgggtgaacaatccaacgcttaccgaattctgcttcggtatgataggaagagccgacatcgaagaatcaaaaagcaacgtcgctatgaacgcttggctgccacaagccagttatccctgtggtaacttttctggcacctctgtcctcaaatttcgagggaacaaaggatcgataggccacactttcatggtttgtattcacactgaaaatcaaaatcaaggggacttttacccttttattctactcgagatttctgttctcgatgagtcccccttaggacacctgcgttatcttttaacagatgtgccgccccagccaaactccccacctgacaatgtcatcaacgcggatcagttcgcgaagaaactttaacgctagaatatgggaaataaatcccaattccgcttcattgattaagtaaagaaacgataaaggtagtggtatttcaccggcgtatgccgaaacatactcccacttatcctacaccctctatgtctcttcacaatgtcaaactagagtcaagctcaacagggtcttctttccccgctgattttgcctggcccgttccccaggctgtggtttcgctagatagtagatagggacagtgggaatctcgttaatccattcatgcgcgtcactagttagatgacgaggcatttggctaccttaagagagtcatagttactcccgccgtttacccgcgcttggttgaatttcttcactttgacattcagagcactgggcagaaatcacattgcgtcaacaccactttctggccatcgcaatgctatgttttaattagacagtcagattccccttgtccgtaccagttctaagttggttgttaaacgtacgccagtaagagcataatccccgagaaggagaaaagcccgaccaaggacttcccggccgccaaggtccaagcaggtccaacatcccttctcaccccgaaaggcgagaaaagacatcggtccacgctcagtccagcaaccgttcaggttccaaggcccaacgtacccaacccttagagccaatccttatcccgaagttacggatccattttgccgacttcccttatctacattgttctatcaactagaggctgttcaccttggagacctgctgcggttatgagtacgaccagatgtgaaaacaaggacccgaaggtccattcttccgttggattttcaagggccgtcgagagcgcaccggattcagcatgaggcgctgaactcttccaaacaccataccctagctccggataaaccgatttcagggtagttcaatggtttgttaaaaagaaaagagaactcttcccagggctcccgccgacgtctccaacttcatttacgttgccgtgttgattccaccttctggttccggaatattaaccggattccctttcgataggaggcacgaaaaatcgtgcaactttcatacggagcttccctatctcttaggatcgactaacccatgtccaactgctgttcacatggaacctttccccacttcagtcttcaaagttctcatttgaatatttgctacttccaccaagatctgcactagaggctgttcgacccaggctcacgcccaaggcttcgtcacaaacctccacgcctgcctactcgtctgagcttctcaaagctaacccagacggtgaggtatgggtagtacgcttaagcgccatccattttcagggctagttcattcggcaggtgagttgttacacactccttagcggattccgacttccatggccaccgtcctgctgtctagatgaactaacaccttttctggtgtctgatgagcgtacattccggcaccttaacctcacgttcggttcatcccgcatcgccagttctgcttaccaaaaatggcccactagaaactctcattcgatggcccacgtccaattaagcgacaagggcgtcttacatatttaaagtttgagaataggttgaggaaattccttccccaagacctctaatcattcgctttacctcataaaactgatctgagtttctgctatcctgagggaaacttcggcaggaaccagctactagatggttcgattagtctttcgcccctatacccaaatttgaagatcgatttgcacgtcagaatctctacgagcctccaccagagtttcctctggcttcaccctattcaggcatagttcaccatctttcgggtcccaacagctatgctcttactcaaacccttccattgacaaacttccgggtcggtcgatggtgcacgccacaagggcgttcccacctgcattcactttcatttcgcggatgggttttcatcacccaaacactcgcatagatgctagactccttggtccgtgtttcaagacgggccattgaaaaccattatgtcagcatccttggcacgaagccgcagtcctcagtccccagtggacgtattacaacaagggctataaacactccccaggcagaacccggaaagccaccttcccttattctttttccgcccccgaaaactgatgctgacctaccacaggttcagagtgcatagtctcgcgaagagactactgatctcacccaggtaagactgatttccaatgcttccctttcagcaatttcacgtactatttaactctcttttcaaagttcttttcatctttcgatcactctacttgttcgctatcggtctctcgccaatatttagctttagatgaaatttaccacccatttagagctgcattcccaaacaactcgactcttcgaaagcgctttatatggcatatccaatcgaccaaagacggggttctcaccctctctgacgtcctgttccaaggaacttagaccgatcgtctacactcaaagcagcttcttgaaattacaactcggacaacaaaagaaatgttgccagatttcaaatttgagcttttcccgcttcactcgccgttactgagggaatcatggttattttcttttcctgcgcttattgatatgcttaagttcagcgcgtagtcctacctgatttgaggtcaaataaaaaaggtactgtgaaaaaaaaataactttttttttcgttaaggttcaaatataaaagagattaaaactttttagttatttttctttcctaatttctttttttctatcaaacaaagtggtaaaacctattacgttcaatagaaaaaaaaatgaaaaaaggcatagaaaaataatttcaatcttccttttgttttcaccaatcgatttcaaactaaatttatattttaaaaaaaaaacaaattttcgttcaacacctcatcaaaaatatttaaaaaaaacattttttgtgagaagattgtaatgacactcaaacaggcatgcctttggtagaacccaaaggcgcaatgtgcgttcaaagattcgatgattcacggaattctgcaattcacattacgtatcgcatttcgctgcgttcttcatcgatgcgagagccaagagatccgttgctgaaagttttaaataattttatatattagatataattaattcagacttcaaaaacaaatttcaaggtttataatttaattttgcttcttttccaatttccttatatttaaaaaaaaagagaaagaatagaaaaatgataaaataaaataaaatagtaaaaaagtaatgatatgcttggcatgcaacaaaaacacaccaaacaaaaatcatccactcgtaatatttacaatttcattttttttttcatcttttctcttttctaaacacttttttttaataaaaaaatataaagaaaaagaaaaaaaatcaaaattgaaaatattttacattttcacagaaaggtaaatggataagagaagaaaaaggtaaaaaaaattcccaaaaagttaaaagatggaaattttttaaaaccttttcatataacttttctaatgatccttccgcaggttcacctacggaaaccttgttacgacttttacttcctctaaatgaccaagtttgtccaacttctcggcaatgtttccgccgttgccagcagaaacaagccaatccagaggcctcactaagccattcaatcggtagtagcgacgggcggtgtgtacaaagggcagggacgtattcaacgcaagctgatgacttgcgcttactaggaattcctcgttgaagagcaataattgcaatgctctatccccagcacgacggagtttaacaagattacccagaccttccggccaaggataaaaaatcaaaagatttttttcaactcgttggctccgtcagtgtagcgcgcgtgcggcccagaacatctaagggcatcacagacctgttattgcctcaaacttccattggctttatgccaatagtccctctaagaagctaatgatcagccaaaatggctgatccagctatttagcaggttaaggtctcgttcgttatcgcaattaagcagacaaatcactccaccaactaagaacggccatgcaccaccacccatagaatcaagaaagagctctcaatctgtcaatccttactatgtctggacctggtgagtttccccgtgttgagtcaaattaagccgcaggctccactccattgtggtgcccttccgtcaattcctttaagtttcagccttgcgaccatactccccccggaacccaaagactttgatttctcgtaaggtgccgagcaagtcgataaatgaaacattgcccgatccctagtcggcatagtttatggttaagactacgacggtatctgatcgtcttcgatcccctaactttcgttcttgattaatgaaaacatccttggcaaatgctttcgcagtagttcgtcttcaataaatccaagaatttcacctctgacaattgaatacgaatgcccccgactatccctattaatcattacggcggtcctagaaaccaacaaaatagaaccacacgtcctattttattattccatgctaatgtattcgagcaaaacttgcctgctttgaacactctaattttttcaaggtaaaagtcctggttccctaccacgctcaataaagaacatgagtagtttgccagaaggttaacgaccccggtcatgaccagtaaacacgccttgcggcggaccagtcgaccaggctcaaagttcaactacgagctttttaactgcaacaactttaatatacgctattggagctggaattaccgcggctgctggcaccagacttgccctccaattgttcctcgttaaggtatttacattgtactcattccaattacaagacccgaaagggccctgcattgttatttcttgtcactacctccccgtgtcgggattgggtaatttgcgcgcctgctgccttccttggatgtggtagccgtttctcaggctccctctccggaatcgaaccctaattccccgttacccgttaaaaccatggtaggcctctatcctaccatcgaaagttgatagggcagaaatttgaatgaaccatcgccggcgcaaggccatgcgattcgaaaagttattatgactcaccaaaaaaagcccgaaggcattggttttttatctaataaatacatcccttccaaaaaagtcgggatttttagcatgtattagctctagaattaccacggttatccaagtagttgaggtactatcaaataaacgataactgatttaatgagccattcgcagtttcacagtacaaaattgcttatacttagacatgcatggcttaatctttgagacaagcatatgactactggcaggatcaaccaggtaactatcgttagaggtgagacaaaaagcagaaaagaagaagataaaaaaatgtttttttttaaaacttctttttacttttcacacaccactaccgtttttaattttttttcttcccaacaaaatcaggaagaaaaaaacaaaaacaaaagttactcaaaggtgaaactgaaaaaaaaaaaaagagaaaagaaaataaattcttcctaaattttttttttacaatttcccattattcctcaattaaaaaattaattttatatgaggttgtctagagatgaacaacatttcctagttctcttttaaagaacaccggatatatcgtttctctgaagacaaggaaattgccagcttggtatcataatttcctcagattttagcattccaacaaataaacattgtttccaaaatatcatataaatagataaaattgtactccatgtcaaagttgaaaatcaaaatcttcagaagtggttcaaacgaaatcaaaccacatagtttttaataaaaaaaaactacggctgttgatctgttgttaccactaaatgactttttcagttcaaatgttagtcgaatgaccatacatccacagaaaaaactcatcgagtctccacaagacttcctctttccattttgcaatggattcgtgaagcgcggattctccagcaggaaaagagaaaagaaaaaatccttcaactctcctttcaaatctgctaaaggatagctaaaaagtcggagtcaagcaccgtcacgtagacaactgcaactcgctttccaacttatccttgcggtatcaaggtaccgggtttgggggaaattacaaattttaaaaaaccgattttacaaaaaagatgaaacaaaaaaaaagtttccaaagagaaagtctccttttccacttctttttccccttcttctcgttcaaccttttttctaaaaatgtaatttttaataagaaaaagaaaagtatgaaaaaacttgacggaccttcttttcattcttctggacaatcaaagaccgttacaaagcaaacaaaaataaaatagtaaaattctatctttctttccaatgcaccgcgatgccaacacaaagagaagaatcaaaacaatttccattttcccattttttcaattcttagcaaaaggagattagcaagtctttacgaaagttgaaaaaaaaaattccaaatccaaaaaaaaaaataaataaaaagttccaaaagctattaaaaactctttttcctcttttcttttttttttcttttcatcttcttttttcttttctcctttcaaccaccactccttttacatagttccttggacctatttttcctcgattttatagaaacatttgtggttgtgtgaatttcgtccatttcggtgcctatttcctatcctttcttccatatccctcctctctccaccaaaagtcctactactaccaccagaaaactatccaccacacaaaatcccactactccctccttacttctccttattcaacgttcaaatacaaacgaaaagaaaaagaaaaacaccatacgaaaatctctttattctttatttgtttgttgaaaccccttttttcttttttcatctttcgtatcttttcccttttttcctcttattttatcttttctttcttttcttttttttatttgtattgattcttatttctctcattttccattgaaccatactccattccctacctacaactaccccttcccacacccatctctgactctaccgaccctgaaaaatttaaagtcccacccctctccacctactctattccgtttttttcatattaaaattggcttttcaataaatattgttttgttaaattataaattaaatttttctttattttttcataaatttttcatttccattttcttttgtttttcatgctttcctcacatgttttgtatcgaaaaatttgcatttttatgttccatcccatatttcgcacgattttcaatacctttgtagttgtttttttgttttcttattttttcttttatttgtttgcactttttttgttttttccattttgtttttgaaaaatgttgggaatgtgtagtgtattatgtttatgttattttgtaaatacttgaatgtcatgaaaatcgaaaattacaaagttggtcaaccaagctcattttcattataaaacattacttttggttaaattatataaaatgtatttatttattttgtaaaaatcctacaaattaccttgtttttttcattttttctctccaccttcccataacatgccccacccttccccaaggaaaacacactctaaatgcattttttttgcactctggcttcagctacatggatgtttattactcaaaattgtaaaagaaatgcatctcatctatttcctctaaattatctattttcttcctccatacaactacctctactccctctttcacttttcaacttttgacccatttgcctgtcgatctttttcattcttgtaaattcacagaacaaaaccaaacacttgagcctcatgatgtgttcaacacgtgataaaggacctatcgaatttcgtaaagatgaaaattttcctttcgaatgactgtttttgcattccagccttctccatttcaccaccagactcatctttacacccgcttcatcagtcttagacaagtaacatcgttactttttgccagatccagccacgcatacctgacctaaatgtggtttgatgaaaaaaatttttttttgtttcttttgaaaatgttggatattgtgcatatgtaaccgcaccaaaattttccacatatttggtcaagaaattgaacattcttctacgtcatgtttggtgatattttggggttctataccagccattttcgatgtttcttttgttgtttgaaaaaaataaaaataaaaataaaaataataaataaaaggtgggttcattaagaatacaaataaaaacaacaataaataaataataaagaaaaaccattacagttacagatttcaaaagtaaaaacataacaacattggatcccttttccacccgttatttcctcacaaaatacatattgttactctcaatccatccatcaaactttatactatttttaaaaataaattaacctcgtgataattttgtccattttccacatttggaaacaactttctgtttttatgttactacactactatatattatgtactttttcatccgtgttaaagtaaccaccattccatcatgatatcctcattatcaccatatccatatccaatgtaaccgtaaccatgaaaaatatgacacaccaaaaaaaaaggaaacccaacctgttgtaaccaattttttttttttttttttttttttttttacacttttaaccacatttaccaaccttatactctctctctctatctctcacacacaagtaaccatgtaaccaaccctaataatcaatacaaatgtaaccctcattaaaaatattacaaaacataaataaatattacaaaacataatatatatctattatatctattttcttttcttttcttttctcttattggtctttttttttttaaaactatatgctattgttcttttaacgtacttttaactttgtttatcttgtttctgctttattctaatttatcattttcctttttttttttactgttctaaactactttgcgtactttttttttactttaccgtcttttattattttaacacgcttggtttgtttgtaaaactgttattcattcttaagctttttaaaatctatgacattacgttaaacttcaataatgaattcttctttcacatctccttccaatgtccaaaaatgttctcctcagtaaataatggttagcgtgtgtgtgtgtgtgtgtgttgtgcgcatttgtttacaaatggaacttgaaatttgaaaagggggaaccaccaagatagctccttgcactgcgttaaatccctctcctattttgacaattccaactcaccaactcattttcaaggtctttttttttttttttttttacgattcacgacctaccttaccacttatcttacctacctacctactactacctaccatacctactacctatgaactacttactactactactacctacaaaaaaaaaaactttggttgaatattttttttactaggatttgtgcattacccttacctcttttcccttcaaaaagtttttacttttccacaaaattgggtattgggtattgagtattttcccaccaattcctaatactaatactactactactactaataccccccctactacaaaaaaaagttgtctgcgtgtgtggactttgaatttattttttcttcaaaagtgcattacccttaccttttatctcttcaaaatatttcaaaggtataaatatactatatactctttatatatattatagggaaaaagttcagaccaaaaaaaaaatcgactcgctcgactttttcttctctctccctcttcttcccccttcccccttcctcctctcctccttcttcttcttcatctcttctttctttctttcctccaatttttctcttcgaattagcaagtctttaattttttgcctaccaacaagaagagaaaaatgaaagaaataagatgatggttccttaatggaacaaatcttgggaacaaaggcttaatctcagcagatcgtaacaacaaggctactctactgcttacaataccccgttccacattaaagtcgtatgcaatggattcgattccgcacaagatttcaatggaatttcatggacaagtcaataaaacacttccgtttcatcaaccatcgcccatcttctacgatacaggagagtaggaacaagtcctacctctatttttatacatataaatcatgcggaccaaaaaatcgtcgctttctggcacggattctggcttagaggcgttcagccgttatccggcagatgatagctccgcggcattgccttgtcaggcagccgcaaataccaatgatctgaatcaacggttcctctcgtactaagttgaattaccattgcgacgacacttcatcagtagggtaaaactaacctgtctcacgacggtctaaacccagctcacgttccctattagtgggtgaacaatccaacgcttaccgaattctgcttcggtatgataggaagagccgacatcgaagaatcaaaaagcaacgtcgctatgaacgcttggctgccacaagccagttatccctgtggtaacttttctggcacctctgtcctcaaatttcgagggaacaaaggatcgataggccacactttcatggtttgtattcacactgaaaatcaaaatcaaggggacttttacccttttattctactcgagatttctgttctcgatgagtcccccttaggacacctgcgttatcttttaacagatgtgccgccccagccaaactccccacctgacaatgtcatcaacgcggatcagttcgcgaagaaactttaacgctagaatatgggaaataaatcccaattccgcttcattgattaagtaaagaaacgataaaggtagtggtatttcaccggcgtatgccgaaacatactcccacttatcctacaccctctatgtctcttcacaatgtcaaactagagtcaagctcaacagggtcttctttccccgctgattttgcctggcccgttccccaggctgtggtttcgctagatagtagatagggacagtgggaatctcgttaatccattcatgcgcgtcactagttagatgacgaggcatttggctaccttaagagagtcatagttactcccgccgtttacccgcgcttggttgaatttcttcactttgacattcagagcactgggcagaaatcacattgcgtcaacaccactttctggccatcgcaatgctatgttttaattagacagtcagattccccttgtccgtaccagttctaagttggttgttaaacgtacgccagtaagagcataatccccgagaaggagaaaagcccgaccaaggacttcccggccgccaaggtccaagcaggtccaacatcccttctcaccccgaaaggcgagaaaagacatcggtccacgctcagtccagcaaccgttcaggttccaaggcccaacgtacccaacccttagagccaatccttatcccgaagttacggatccattttgccgacttcccttatctacattgttctatcaactagaggctgttcaccttggagacctgctgcggttatgagtacgaccagatgtgaaaacaaggacccgaaggtccattcttccgttggattttcaagggccgtcgagagcgcaccggattcagcatgaggcgctgaactcttccaaacaccataccctagctccggataaaccgatttcagggtagttcaatggtttgttaaaaagaaaagagaactcttcccagggctcccgccgacgtctccaacttcatttacgttgccgtgttgattccaccttctggttccggaatattaaccggattccctttcgataggaggcacgaaaaatcgtgcaactttcatacggagcttccctatctcttaggatcgactaacccatgtccaactgctgttcacatggaacctttccccacttcagtcttcaaagttctcatttgaatatttgctacttccaccaagatctgcactagaggctgttcgacccaggctcacgcccaaggcttcgtcacaaacctccacgcctgcctactcgtctgagcttctcaaagctaacccagacggtgaggtatgggtagtacgcttaagcgccatccattttcagggctagttcattcggcaggtgagttgttacacactccttagcggattccgacttccatggccaccgtcctgctgtctagatgaactaacaccttttctggtgtctgatgagcgtacattccggcaccttaacctcacgttcggttcatcccgcatcgccagttctgcttaccaaaaatggcccactagaaactctcattcgatggcccacgtccaattaagcgacaagggcgtcttacatatttaaagtttgagaataggttgaggaaattccttccccaagacctctaatcattcgctttacctcataaaactgatctgagtttctgctatcctgagggaaacttcggcaggaaccagctactagatggttcgattagtctttcgcccctatacccaaatttgaagatcgatttgcacgtcagaatctctacgagcctccaccagagtttcctctggcttcaccctattcaggcatagttcaccatctttcgggtcccaacagctatgctcttactcaaacccttccattgacaaacttccgggtcggtcgatggtgcacgccacaagggcgttcccacctgcattcactttcatttcgcggatgggttttcatcacccaaacactcgcatagatgctagactccttggtccgtgtttcaagacgggccattgaaaaccattatgtcagcatccttggcacgaagccgcagtcctcagtccccagtggacgtattacaacaagggctataaacactccccaggcagaacccggaaagccaccttcccttattctttttccgcccccgaaaactgatgctgacctaccacaggttcagagtgcatagtctcgcgaagagactactgatctcacccaggtaagactgatttccaatgcttccctttcagcaatttcacgtactatttaactctcttttcaaagttcttttcatctttcgatcactctacttgttcgctatcggtctctcgccaatatttagctttagatgaaatttaccacccatttagagctgcattcccaaacaactcgactcttcgaaagcgctttatatggcatatccaatcgaccaaagacggggttctcaccctctctgacgtcctgttccaaggaacttagaccgatcgtctacactcaaagcagcttcttgaaattacaactcggacaacaaaagaaatgttgccagatttcaaatttgagcttttcccgcttcactcgccgttactgagggaatcatggttattttcttttcctgcgcttattgatatgcttaagttcagcgcgtagtcctacctgatttgaggtcaaataaaaaaggtactgtgaaaaaaaaataactttttttttcgttaaggttcaaatataaaagagattaaaactttttagttatttttctttcctaatttctttttttctatcaaacaaagtggtaaaacctattacgttcaatagaaaaaaaaatgaaaaaaggcatagaaaaataatttcaatcttccttttgttttcaccaatcgatttcaaactaaatttatattttaaaaaaaaaacaaattttcgttcaacacctcatcaaaaatatttaaaaaaaacattttttgtgagaagattgtaatgacactcaaacaggcatgcctttggtagaacccaaaggcgcaatgtgcgttcaaagattcgatgattcacggaattctgcaattcacattacgtatcgcatttcgctgcgttcttcatcgatgcgagagccaagagatccgttgctgaaagttttaaataattttatatattagatataattaattcagacttcaaaaacaaatttcaaggtttataatttaattttgcttcttttccaatttccttatatttaaaaaaaaagagaaagaatagaaaaatgataaaataaaataaaatagtaaaaaagtaatgatatgcttggcatgcaacaaaaacacaccaaacaaaaatcatccactcgtaatatttacaatttcattttttttttcatcttttctcttttctaaacacttttttttaataaaaaaatataaagaaaaagaaaaaaaatcaaaattgaaaatattttacattttcacagaaaggtaaatggataagagaagaaaaaggtaaaaaaaattcccaaaaagttaaaagatggaaattttttaaaaccttttcatataacttttctaatgatccttccgcaggttcacctacggaaaccttgttacgacttttacttcctctaaatgaccaagtttgtccaacttctcggcaatgtttccgccgttgccagcagaaacaagccaatccagaggcctcactaagccattcaatcggtagtagcgacgggcggtgtgtacaaagggcagggacgtattcaacgcaagctgatgacttgcgcttactaggaattcctcgttgaagagcaataattgcaatgctctatccccagcacgacggagtttaacaagattacccagaccttccggccaaggataaaaaatcaaaagatttttttcaactcgttggctccgtcagtgtagcgcgcgtgcggcccagaacatctaagggcatcacagacctgttattgcctcaaacttccattggctttatgccaatagtccctctaagaagctaatgatcagccaaaatggctgatccagctatttagcaggttaaggtctcgttcgttatcgcaattaagcagacaaatcactccaccaactaagaacggccatgcaccaccacccatagaatcaagaaagagctctcaatctgtcaatccttactatgtctggacctggtgagtttccccgtgttgagtcaaattaagccgcaggctccactccattgtggtgcccttccgtcaattcctttaagtttcagccttgcgaccatactccccccggaacccaaagactttgatttctcgtaaggtgccgagcaagtcgataaatgaaacattgcccgatccctagtcggcatagtttatggttaagactacgacggtatctgatcgtcttcgatcccctaactttcgttcttgattaatgaaaacatccttggcaaatgctttcgcagtagttcgtcttcaataaatccaagaatttcacctctgacaattgaatacgaatgcccccgactatccctattaatcattacggcggtcctagaaaccaacaaaatagaaccacacgtcctattttattattccatgctaatgtattcgagcaaaacttgcctgctttgaacactctaattttttcaaggtaaaagtcctggttccctaccacgctcaataaagaacatgagtagtttgccagaaggttaacgaccccggtcatgaccagtaaacacgccttgcggcggaccagtcgaccaggctcaaagttcaactacgagctttttaactgcaacaactttaatatacgctattggagctggaattaccgcggctgctggcaccagacttgccctccaattgttcctcgttaaggtatttacattgtactcattccaattacaagacccgaaagggccctgcattgttatttcttgtcactacctccccgtgtcgggattgggtaatttgcgcgcctgctgccttccttggatgtggtagccgtttctcaggctccctctccggaatcgaaccctaattccccgttacccgttaaaaccatggtaggcctctatcctaccatcgaaagttgatagggcagaaatttgaatgaaccatcgccggcgcaaggccatgcgattcgaaaagttattatgactcaccaaaaaaagcccgaaggcattggttttttatctaataaatacatcccttccaaaaaagtcgggatttttagcatgtattagctctagaattaccacggttatccaagtagttgaggtactatcaaataaacgataactgatttaatgagccattcgcagtttcacagtacaaaattgcttatacttagacatgcatggcttaatctttgagacaagcatatgactactggcaggatcaaccaggtaactatcgttagaggtgagacaaaaagcagaaaagaagaagataaaaaaatgtttttttttaaaacttctttttacttttcacacaccactaccgtttttaattttttttcttcccaacaaaatcaggaagaaaaaaacaaaaacaaaagttactcaaaggtgaaactgaaaaaaaaaaaaagagaaaagaaaataaattcttcctaaattttttttttacaatttcccattattcctcaattaaaaaattaattttatatgaggttgtctagagatgaacaacatttcctagttctcttttaaagaacaccggatatatcgtttctctgaagacaaggaaattgccagcttggtatcataatttcctcagattttagcattccaacaaataaacattgtttccaaaatatcatataaatagataaaattgtactccatgtcaaagttgaaaatcaaaatcttcagaagtggttcaaacgaaatcaaaccacatagtttttaataaaaaaaaactacggctgttgatctgttgttaccactaaatgactttttcagttcaaatgttagtcgaatgaccatacatccacagaaaaaactcatcgagtctccacaagacttcctctttccattttgcaatggattcgtgaagcgcggattctccagcaggaaaagagaaaagaaaaaatccttcaactctcctttcaaatctgctaaaggatagctaaaaagtcggagtcaagcaccgtcacgtagacaactgcaactcgctttccaacttatccttgcggtatcaaggtaccgggtttgggggaaattacaaattttaaaaaaccgattttacaaaaaagatgaaacaaaaaaaaagtttccaaagagaaagtctccttttccacttctttttccccttcttctcgttcaaccttttttctaaaaatgtaatttttaataagaaaaagaaaagtatgaaaaaacttgacggaccttcttttcattcttctggacaatcaaagaccgttacaaagcaaacaaaaataaaatagtaaaattctatctttctttccaatgcaccgcgatgccaacacaaagagaagaatcaaaacaatttccattttcccattttttcaattcttagcaaaaggagattagcaagtctttacgaaagttgaaaaaaaaaattccaaatccaaaaaaaaaaataaataaaaagttccaaaagctattaaaaactctttttcctcttttcttttttttttcttttcatcttcttttttcttttctcctttcaaccaccactccttttacatagttccttggacctatttttcctcgattttatagaaacatttgtggttgtgtgaatttcgtccatttcggtgcctatttcctatcctttcttccatatccctcctctctccaccaaaagtcctactactaccaccacaaaactacttcttctgttactctccaattagttgttactcaactttagttttaggttttgcatttgtattagtggaggtgtcttttactagcaactcggccaaagcaattaatttatgtcgtgatttttgaagtggctatttaaaaactttaactatttttgtagtttttttaatattattttaagtttcaggtaatcttcagtaatcagtggtttgtgctatttgggcattttacatttgatgaatttttatttgattttcaagtttgttatgtttttataaaggtaatataacttaagtttcctgtcaatcctgtggctagctacttcttacgtggattctcaagaccagggagtagctaatttcttttcagaaatacatgatttgtatagcaggcagcaatatggacaagctttagaagccctgttggttagagcaccttggatccatggaaatacaagttcaccacttgaacgactctctgataaattagatatactatcaaattccggtgagcaagactcaattgtttctttggcggaataccttgaatcaagtcaagatgatgctgaagtgtatgcaacattcgtacgacaatacataagtagtcatgcaagtcttagtagtgaggtcaatacacagctcaatactatgaatttaattcagggttattatcagactgtaagaccggagcaactgctatcaccaatcaaggaacaggacgcttagacgctagttagagagtgcattggaaaacatgtggataaagaaactcctttgtaagagttgagtgcaactttattttatcaatgattttatttattaattcaagtctcgttagtttgttgtgcaaattacagcactgtttctaaaattcacaagaaaatatcaatttagtatattactgagtaatagcgttacgataaaaacgaaacactgtgtgtaaattttgtctataaggactttattttataggtgtcactgtgcaaaaaacttttagtagcagttgattcatttcctcgtgattagaaaaataaaatatgatacgtgtaaaaaaatctataacagctataatagaaagaaaaggaggggaaattataattagaaatgagtagagaaagaagaaagagtctggttattgtaagatacctaagaactgaaacctaacgaaaaaagaaaagttgcatgtaaagtcattaaagaataaaacaaaccagaagttatgatcggtgataacaaattagaagactgataaatttggatattgtttcttgggttattaacgattatattgcaatagattagtgagacgatgataggggttattaaatgctttaggattatgggatttatcaaataaaaaaacggtgcatgaaaaaatttattcagatgattattattaagagataggacttttaaaaaacgttattaaggactggttttatttgatgtatctcgagcattagaaatctaaaaattcggcacacaagcataaacataaaaaatcatattcatcgtacaaaatttttgattgtcatattcaaccgttgattttctgttatcaatttgagaagttgtgagcaaagtagataaaaaatgtccttcaagatacattggttttcattacagttattttttataacataaagattttaatatcattgcgcttactatggcctcgatttattgacaaaacattccgagtcgactttgcagtatagcaacgtatcaatgtttttgacaatgaacgataattaaaattaccttagttatcagctacgcagtttggtatatgtttaacaataaatttattgcaatgagtttctattgcgatatactaagtgtgtttaaacaatagtgttatatttattgttaaaaaaatccaatagtatcagtaaccgatctagaactaagctgagaaacgagcttcagctttacttctatctacgttattctaattactacatattttaataagttatcattcaattctatctcaatatcatatcatctatggtacaatgtgtaaatagaacatgcgacatatagtgatatgcaacgcagtgtattatcgctaacaactgttacaccgtgtaggaagtacgtataattcaggggtccacaatgtgatagaagctcgttcttcttaagcgtttccacaattacccgtttaactttgccaaccttgcagcaacggtttgccgatttttttcatcagaaactaaatccaagcacaagaacagttatgagcacttctttggatgtcgccactcgaacttcacacttgctcatgttctgatttactgaggcatggattatgtctccactaaatgacttatatcataagaattcataataaaattaaaattcagaataaggatcaaaaggttttaaccccattgcttattagcacacctaactattgtatgattgaccgccaatgtaaaaatggcatttaagttgaattgtagtatttctatccttattatttcactttccttcttctctcttgtttccactttattaatcaaaagtcaaattaattaggccgggtttctttgtgttcgttgcataagatagttgagctcaaaaaaatagttccttttcttttttcaaatcacgatattttagagcaaaaaatatcgcatcttatctgtaggctcataatgctgtttcgctctttcggttacaattagtatgtgtatttcaaaagtaccacttttaccaactattacataactacgcacgaatacaaaaaatatggatcatattttacataattaccacctatcgaaatgtgaacaagttcatagggcaaatatccgtattaatttggatttattatttagtacatgttgtggaattcgttaaatattattactttttttgcaataagctaaccgatttacgaaattctggcccattttaatttcatgctttgcacagttattagttaactatctgatgcatcaactatgtacaatttccttacggtctacagtatcattatgcgcaagattggtgtaccaggtatgttacgaacaaacaaggaattggattaaaagtgtgttagcacacatgaatatcttttcaaattttatattctcattgagctcacttactactaaaagggtaaatataatagtatcataatgaaagtgaaagtatcgttatcacatcatggacgtctttagactttgtcatgaaaaaggagaagtgttgattggtctttaaaaggttcatttttctttttcaatttcattagactctatgcagggatctgaaaaaacctagtcatatatttgttttcacaaaaccaacaaataaaaaattataggaagctgtatgccaaaacggatgaatttcttgaacgaaataaaatataaattgtaaaatattagttacaaaaaaaatttatacttcggtgaaaaaaatccggttagcttattagagtagtgatcgtcttctgtattgtcagctgcaggcactaaccagaccttcatctcatatagtccacaaagatattccgctaaataaagttatatctatcgcaaggaaagctatctgtacaataaatattagcaagtaacatttatggtaaaaaaattgggatttgttagttgttgaatacaatttgtaaaatagtcaaccttttcgcggacaagataaattgctcttaattgcaaatatacgtctttcactatataagctttacgatagaagggatcaattgacatctaattatataaagcatcaatttcattaaaaaacgtttattaacaccgaaacataaaacatcaaagcgaaaatatacaataaaatatcaaagtatcaataaaaaacgaagagaaagcaagatatttgaacaaaaacataaattcaatggaactgatgaaattcatattcagtactcgcttttgaccataagcctactgcatcacgaagtcgctttttcaacttaatagtttcagcaggactaaacattataccatatcccttaagatattggacacactgttcctttgataattcatcaatgtcttcgactctttctatcggcggtaatccactattagccggctcattaccattcagaaatggcactggttatgccaaataaccttggtctgaacgagttgtattttcaagctttcttgtcaacatgatcgacctacatgagcgagcatcaattgtttccattttctgatccattgagtcaagtcgctgctccatagaatcaaatcttcggtctatggaattaaatcgttggtctatagaattaaatcgctgctctattgactgaaaccttgcttcagttttttgctcgagtaaatcaattctagtgttcaaacggatcgtttcccttttcatttcaaccatttcaactttcatttcggccatttcgcctttcatagatgtcatctcattctgtacagtgtcaaaccgagaattcatctcattctgcatagcgtcaaaccgagaattcatgtcattttgcattgagtccattttagaaaatattcgttcgaaaattccacctagtttagtgtttgcccattcatctatccagcgtggaaattgtacttctcccgattgttcttcagaaatttccctttcaatcgctaactttttccatccttgtagcctttcattgcattcaatttcatatttcattttacgatctcgttcctcaatatatttttcaagtgcttctcttttgttttcgtcaatttctaacaatgtagaatctacagatctctcgtatcttttaatgaaaatttttaaatcttccgcagaatcatttggtggtggcagattgtagtcattatcaaaattctcgttcgacatcatccttattatttatacaaaaccagttgcaataaaccgcagtattctttttaacgataaaattgcaattcactataactatacaaatgatatcttttgtagcctgccttatatgtttactaattgacaaatatttctcagaaagggaaatcttggaaaataaaagtacaaacgtgtgttgaaagcaatatttaatatatgtgttgtaagtaaattcaaatctctcaagttccccttatatacaactttaaacaaagaatgctaaggacaaagaaaagagtttttgatggattaagaaacaaggtaacctaagtaacttcacattgggagtacgtgatacagataatgaaaatgggctttatctgtaaaataaaagaaaaatggcttatttgcaggtaacttattacaaagttagatttattgaatagaggagtacatgtataaaagcaaacatggccaacaatgttgatacaaaaaatttcgttagcctggattactttattcgtttcaaaggctgcttaacagcttgtagcaatcataaggtgttttaatcaaaagcacattactcattcaagctagataatttgtagattgtataagcggtagctacaatatatgctcaagggatataaactggttattgaaatagcctctgcaaattaatgaaagaaacaaagcttaatagaatacccccaattattttaagacgaaagagttttttcacgttcctgaaacaatgtgtttaagaaactctcaagcaagtatactttcattgaaatatacctctgctgttaaatagttactatgagcaaatataataggtaaactgcacaaagcaaatacgtaaaaactcctacataatacttgatatgtacaattgtcatttagcttgaaaatgctagatagaatagaaacgcctctaaagaaaactatatttaaataaattgaataaaaaataaaatggcaaatttgcccatttacgtaatgttacacattgatatccaaaaggaacttttatcgtacataaacacaatttatttaatttggaaagattgagttttgtatattcttgactaactattggtctaagttgacatttatttaacccatatttattatccaattactcgcttcgtttttacaagtactgacatctcttaatcctgcctataccatttatcctgtgtattattcactcatttaaaattaagattattctaatcatctcaaatcgggcgatctcatctggtttgtgagtcggactagttcaacttcatagaccactaagctctaaacatgatctcaaataaagtcaccatttactaccctgagataaaattgctggtgacttcattcgtaggtatcatcaatgacaatatctataaatggaaatacgctatataccttgcgttgcctaaatagctgagtacaacctgttggacgacttctcttgcagtagtccgtaaacttggaattgactccagctcctttaactttgcagctccattgcattgtctgttcggaaccagcacagtgtccttcacatctctctactagacaacctaaacttagaaagctttgacctcctactatgcaactccatgaaactccgtagttgttgtcacaaaccaacttgcttgactatcatcgacatatttgtattgaacattgtacagatgtgctatcaacacaccacaagaagcaagagacacggtttgtctcttattcgccccttgtacattgcaaaagctaatgtccaaatccttaatcgatatacctggttgaaggattgatattttcaggtccttcataaacactgtcaccaaatatataacaatcagtggtatactgacctgttagaagttgacataagtaagcatcggtatcagtgtttgtttctgtaatgctatttaataagtagttgtaagcttcaattcgtacatcagctgtatcaaatagcatcagtccatgttggtcaattaaattagcaagtaattctgcatagttgggaggcagcttagcatagtcaacaaaagtcaaattcacctcagctaagacaagttttatgaatacacaacaaatacaaaacagcaataacatataagatctgtcaggttctaatgttatatctttctccgtttagcttataaaactaaccgaaaaaaagtgtatatatactgagttctacctttaaattaatttttgtagttgaacaatattaacggtttgaaatgatatattacatgataattgtcccatgcgactaactcggttgttgccgggggcatttgatgtatgaggagtcagtgttagctacgcggtttggtatctgtttaacatacttagaaccgcggtgagttttccttgtgatctattatattgcaatacacaggtactatatgtagcaacttgatattggtaaacaccagcgcatcttattgtatcgtctttctaaaaccaaactgcgtagaggaagaacactgcctcagcacctttcgttaaaatcataggagcgcttttttaaccgacttggaattagttggaatatgttcaaagcaataatctttgatcttttcctgttaaacgaaaggaaaaaaatttcaacaatgagtcaaattcttagcaaaaagcagttttgagtgataatataattcctttcaatgttttgtttatttttgtatacccatgggatgaaggttaagaaacaccagacaactgaagataaagttaaaaacttatttttattttattttaactttatctttagaaaattgacataggtgagtacaggttagaataagtttcttatatttccaaactggaattatttaatgcaaacatataatgcagttatctatttatctaaacatctgcgccactagacattttcattgttcttacttattaaaggccctatttttgttttcttttctttgtttacctcttttggtcctttgcatgctttgttttcattgtagataatgagggttccaaaggctttgaaaattatatatatatttatacataaactggtgtaactttgtaattgtatttttatctggtgttcttgatcctggatacatattgaacaacacgtttaaaacactctaccaacttttaataaacagcgttaacatttactagaacaacacactatatctttctaaaaaatgactacgctcattattgattaaaaatcgacgtcaaacgagaattttgaaaatggtttcgacttacctccaccagatgattcagcagaagacttgcaaccgtttatcaagaaattcgaaagatctctaaattctgctttactagaattcggtgagaataatcaggaaacgattgaaaaattttcgtcaagcaaaggaacattaaatagatttgaaactgaatgtgatcaaaagttgcgaaattggaagagattggcgatagaaagggaagttccggaggaaccattgggagaattacagtttccacgctggatagacgaatgggcaaatactaaactaggaggaattttcgagcgaatattttctaaaataactcaacgcagaatgacatgaattctaggtttgacgctatgtacaatgagatgactgtcatgaaaaatgacattgcttccatcaaaggtaaagcaactacttttaagaacgaattaactgccatcaaaggttctatatctcaattagatagaaaaatcgatcttttggatcaaaaaactgaagaaagatttaataatatggctcaaacgatgcaaaaaattgatgatcgttcttgcaagtcgatgatgctaacaaaaaaatatgaaaatatggtccgttcaaatatgcattattcggctgttccagtaccattccttaacggagatgaacctagagactatgaactcccaccgcttgcaagcttcgaagacattgataatttgacaagggaacagtgtattcagtatcttcatgggtatggtgttttataaatttagtcctcttgagactgtcaagttgaaagaacggcttcaaaaagtgattggcttgtggtcaaaaggacacgtgccacacaagtatcacacattttaaggagtctgtatttctatatcttttgctgctttatcttctcttagtagaagattgttttttacttgtccttattatgatatttatacatcactttttcgcttttatagtcagtagtagctcttctctgttgtagcttaatataatatgtgttcgcattattaccaatggggctattcgaagtcaccacctctgacgacttggttaagagagtagtgagtggcaggataagggtctgcttctgtaattgattagtgcttctatagcaaaaatacacgttttatcaaaaggaagcaactttggtttgctagtccgtattcatcctcattgactgataacatattgaatataagcacatctccgctaactctcatattacaatgagctaagatccttgtggttacagtaacattcaacagcttgaataaattcatattcgatgtattgaacctttaggaacttagatacagaaaacgattaaaaaagcactttgtaacgatctaaaattcagaataactatcctgtgtaaagttatatttgggaaatagctctacaacattttaatctctaaataatcggtatctacgttaatagatacagttccatagctgttagtgaatttaaattttactaagataaaccattcaaaaagagtgcatcagcggtaggagtcattagagggaaattttgaaaatggttttctcccctgttgtaaaaccttgagatattttatctatcgaactcatcctttacatcttgactgataagggttccaaaatcatttcaactgtatcatgaaccaacgaggtattcggttttattcgtatcacatttgcaatgcccgttcggtaaaagtcgatttcataatgttaataaagaaaggaagcccaaaactcacttttgagctgaatcgcgcctttttcgtacttcttcatacttcgtttatacaacaaacgaattactagtataaataagcttgtacttgatgttaatcctcaccatcgtattgaacgtgaagtttatgtttaagtaacacatggaaatgaaaataagcgatttaagcaagctatcgtccatcaagataatgtcaaataaaaatgaaaagttggactttgatttcgcataacagttagaatcctaaacaaataagcatggaaataaatatcaatatggcttatattgcaagaaaaaagtctctatatttgcatgctctttaatcattgctttccgggaattatttacattgattttagtctcatatactcaaaattctattgtatctttcattttcttccaaataaaaatgaggttgtggataaataatttgtttgagcaattaaaaaaatagataggtatcgtttaaatttctgtaagagtgggtcattatttggtcggtagcagtttgtgaagatgtttacaatttagaaaatttcatttaggctactcaacttatacaagcagtccccttatttgtgctgaaacaataatgaaaattataacatcgagtctaagtcatgcttgacaatgttttgtttgtgttgaaattaataggaaataaattgaagttgatgtacacaatagaaattcgcttaggtttgcttaggttttttaaggtattttctaaaattttaattttttttttaaaaaaaaaaaatacaaacaaatttataaagaactcacttatagctatcatattgattaagaagcgcaatgaatcgtatttaattaccagtattaaatttaattcaaattaaattttttcaaagtttaacctagcaaaactaattaattagacatccaccctatatgtgatattcgcataaatcaaccacattaagctactatctcttcgtacgtctacccgataatggtgttaagcatattttgggattgatcatagtgtttagcagtttctatctcatatcattagatagctactcaaagtttaaattaatatatctgaagtagaaattttatagttcttatctggcttttaagaaataaaatttttaagtgtacgaaaacaacctatgcgcttctctgttgtcaatatccagttatagaaccataaatagaaatttgacagatttaaaggtattttcgatcagaattttacgtgtagcacgactgattatactatcatcccaaaataaaacgacaacattttggatgaaaggtagccaaatatatattattcatgctcaaagttatctcatcttgtctaaatgcatacaccagcagataatctctttggtattataatcccttttcttcttttgaaaagtttagagctactatatagtatatacatcaaacactaatttcaattgcatgccgtaattttttatatcgtgttcctcgattctgtgtataccgattggcacatgcgagacaatcgaaattattattatttactatagtacttataactagtttaaattaaattcacttatatgggactttagttcgttcgttatttagtcaggcagatgtcagaagaaatattggcgtggatgtaaacttcatactacaaataattcttcagaagactttatacctttcagaaaaataagaattgagagacctgcaaattttgttccattaaattttgataaaatatattgaaggacaggatcggaaaagttggtaattgaaagagaaatttccgagcagaagtataatattcacaatgaatttagagagacaaatagagaattaggaattttcgtccaataagtattttttaaaatggagtctatgcaggaaggcatggcatctaaatttaactctatgcaaaatggaatgcatttatggagggtgaaatttcctctataaaggacaggattaattttcttgaacaaaaaaaatgaggaaatgcttaaaaagtaagagaaaaaaatttaaattttttgaaacaaaaaacgcaaactatgaatgataataattcttgcaaattgaccatgctaacgaggagacttgaaaatatgactcaagagtatggtcagccggatcttccagtaccgtttcttaatggagatgaaccgggaaaattaaaacttccattgtcagaaagacatgaagacgtcgattatttgacgaaggaacagtgtattcaatattttaatggttatagtattcatttaatcccaccgagaatatcaagttgaaacaacgagtttgcgatgcgtttgaatttaaagtgaaaaagaactatttatggatataatttaaatgattaaattacgtcccttcgattgtttttgcgccgttactaaggtgtcacgcttcaattctcgtgtcacagtagcaactttcaatcaaataaatattgtgcttaattcatttaattaatttttttgtaataatcagctattttctctttgtattgtgtccatcaggattctaatatacgtcgcttatgtcggctgtactgtaaaacagatatagtctttctaccaagcgaaatgacgtctaaggaaaaatgaatatacaaaagtaagtatctttcgttcgattttaaatactacttgaacaagatacccaagtttcttttgtttataaaagttatgttataagtatcaattaggttaatggtcaatgtttcatttttttttagaaacttcatcctcatggaatacaatctcccactgatttttgcatttttggcactgaaaccagatacggactgtcttcagatatttctataaagttgaagacaaaggtcgataaaattaaagaaaaaaaagaagaggttttaaaacttaacactagtactttttatggtaaagctgaagtacgtctaatcaatgatgtttcaattttagatggaatcaacaaatctgtagttcgttatgatacaggtaagatatcggaaggactgctacatcaagaggagatgaaaagaggtgttgaaaagagacccaactgttcggaaacccgcaaaacacattttcatgataattgtgtgggtctgctctataatattttgagactattctatctcatagatataaattttgacgaatatgatgcatatgctacttattttcaagataacgctttattagttataaatgtacacttatttggagaccaaccattttctagcttggaaaactttgttgttcaacccgtcagcgtcaatgttatttgcaaaccagaacttaacgagacatttaattcgaattcaaactatctaaaagtaggaaatacaattgatgaacattttttgaaggtgattcaattttcaactgctgggtggtctcatgttcaacctctggcattagctcataaaagtcctccgcttacggaatctctttattagtaacaagcgcaaaaaaccaaaaaaaagatgatttcaaactgcgagatatcgtttaaggaattggtgaatggcactcaggatattgagaacatcatcgttcgcttggtaaaggataatagactatttacacagtttgatattgcttatggcatggttgcacaagtttttatgcaattaaaaccatttttagttgagggaacttattggattgccgagccccttttaatgaatattcccgagttgaaaacccaaagaggtcgatatccaagtcttcttgatggtcacctttggaaattgacaaactcgctcaaactactcttaaaaattggtattcgctacgtgatatcattttttggcattccattgctctttctgaagcctcgtatacgcaaaaatatttattgagtatagaaaaatacagtgaagagagagagaaaaaaatgcttttgaatggagaaatcaatgaatcatctggactgcttcatgatgtggtgctggctgctgaactttttaatgtgaaacacgcaagttactacaacgtacatgctggacttgataggtttcaatttctaagaaaaccattaaagtctttggtgatgtttactgatgttgttaaagaaagggatggtacttgtgatttttgtgggacgtattttgaagactcgagaatgtctacttcttatctatgtgatgaaaacagaaaaggtgaaaatcgtaaacttgaaatacgagatctagttccatacttatatccagttttactgagaggagttctttcactccctgtatttgaaagtcgcttgaagttcgctgccaaagtgcctatctaccccaaaggacctttgtacacaacagacactcacacttataactatttgatgaattgctttgtaccaatgaacgaagagcaagtcttgagcgcgtgttatagattttttgcgaagagtgcagaaaatgaactatttgaggcgtgaatattaattgaaaaaattaattaaaaaacgtttgcgcaataaatgtttcacagtggaggagaagtaaatatatatatatatattggttattatttgtaaaagctattgtttattgttactaatatccttaagctctgtacaagtcatcgaaaaacatttttttttcatttttaaaagcaagcagatagatctctagaagcttgcttttacggtgtatatctttttcgccagtgaataagggtggcatgttgcaaaaggctttgactattgacatcgttttttactcatctctacgcagtataggcatatcgtatacgaaaaaaggtcaacgtttatccttactctgtatttagttgccattacatttttgcaattagtaacttaagttttttgatagagttccaaaaatgtaggatcacgacgaagccaaatttttatgagtacttaaaattcacaatagcattttaaatctatgaaccttttccatgcttttaggttcagtgaattgcttgcagatcacaaatgtatgcgatttaggcagctacgttaaataaatttgtgactgcgaggattaagaattaaataaagacttattgttactattctactacgtttacttattatttctttcgatacgacacttttgtaaatgaaactgggctttttctcgaatactctaaacagaatatggtttattaaatttgtcacatttaggtttcgtttatcagtctttcactctcgcaatatattttaaagatcatcaaaaaagtatacgctcgtcaatttttatatagttcttaatgtaacatacggctgatcaatgccttactaatgttagatagtgtgttttaaaaatcgtttatcgacttataaagctcgctgttaataaaataatatcaaaacatttttgtgaagttaaaaaaataagttatagaccatcaataaataataattttgataaattagaatatgtagatgttgtagacatcataaaactgtatgcacaaatagactatgaagggaagttcatgaaaacttaaaggatattcctacttaacaaatccacaaagttcattccattatataaaggatgattcacataatgcttttattttgccgtagaaaattctaaagcaccatgtagatcaacgaaaaaactctaatccgcatactattggcataaataatataaaagttttttgttgacagaagtttcaaccatctcgttcagccaacatattctgcaccctttcatcgtaacagagtagtccattctgtgaagggtgccatatacaacaaggaatcaaaatttatgttacataacggattgaccaacgcacaaaatcacctatatggggggcaattccagtaggagaccaccatgagatggtgccaaagtatgacacaacaaaaggacgcatggtgaacattaaaacaccttaaaaagtgtcgccgaatgttttgaagtcgtagatgattcaagataaaagttcttatacaacaaataaattacatacagccatatcaaataacttctggaacagataacaaatacatcgatcatatccaaagctttagaggatctcataagctttctgtacaaaatcttcaaaacaatctggtaagccttggatcaatacaagcctgtcatagtcatagctatgaaattacgctttattagtcgccatactccaaaaccaaatacggccaaataagcactagacgttccaaaaaaaacatcgaaagactccttaatgtccttttaattccatggggtaaattaaccaaggtagttgtaattagaaggctttgtccaccaaaaagaatgcggtaccaaaagctgaactcacaatgagcagtgtaagagcacaatgcatgggggaacaatcggagggttgtggtttcattaggtgtacccaataaacggaggtcggaaaaaatttgaaaattaatactagagggctgtaatacaaagcattatttgaataagcagcgttacgcatgtcatggatttgacacttgtcatctaaccaaaccttaaggccagcaggtgataggtgatccttccttagttagaggtcttgagacaaagcaaaaaagtctttctttcttttctttaactgatagaaaatgacctggataggtaaaatcagtggataatgcaaaagtacgaacggactccccattatacaggaatggaccaatcaactgatctctttcagaaaaggaaatgaatagggacgcagacagtctaccattttgctcaaagatttgaggacaatagtgctttaagacaacccacattccgaactgctgatcccattctgcggcattttaatgagtaatggctgtacttccaccggactttcgaatattgtaagagaatacacattgtctgttcgtttgcatacatcaattgacaattattcgaagttgaagactatcattgtccaacttaaccttctcaaaagaatttgccaaagccaaaagagccatttgagcatccgcttctactctagttaacttaaatagtgtttaacaactagcaaggatcaaacctcctataatgcttaaaaaacttcgcatgctgtttagtcttgattaaaaaaggtaattaacgaatgtttaaattgacgacgcttacccttgtagtgctcgcctcgctacattaagatacacagcagtttgttaagtgtttaaaagattaattacgaatgcaaatcttactagggctcattatcctacaaatgaaaggttctttgcttattcgaatttaaaaaaaaaacttgaagtttataaggctaaagattataaaaatattaattgagtgattttacaagtacataatcggttattgggaatatgcggtagacgacattataaatattgcttagagtcactaaaacagcaaaatactttcacatattctaaatttaatcaaaaagtcaatatacctgactgttattgtaaaagataaattcagaaaatagttgaatatattgatcgttagaaaaatagtgtgaaacaaatttaatctcgcatttttttacctaacaaatagagacgaaagtgcatttatctaatttacgtttcaatattgaaattcttacagtctactcattatttcctcattaaaagatcgacttggcactgaaaacaaatgaaccgccgatatcctatattgttacaaagcatatgcttatttgaaaatttcacaaattttattgggtatccaatctatgtgggcataattaaatgtacatagcaatgtaaaaatctctcttaagttatctcaaaaaatgaagcttttccgaatattgaaaattgaaaacaagatagaaaatataattttaaacaaatggggccagatattgccattgttttgacctaatcttcaatgacgacactaaacttattaaaagaagaaactgaaatcctcttaatgaactgggggattacaagacttgaatcattggtcaaataaatgattcaccgaccatgcagtaatgcgaaatataaagaacaatgtcgtctttcctaaaacgatgaagaaggaaagtaaagatgttccaaatatttacaaccataggaagtaaccaaaagagggtagccagtgaaaaagtttttatactttttcgggtaaccaaattactaatacaataacatgcttttgggtaggaaagctagtcatcatattaataaaagtaaatgatgataatgataaacataatcacaaagaacaaacgataacttgtaaaatcaagatttgtatcgttgttttatcacgctgtattttgttgaattttaattcattacggaaacgtgcttgatgacactcataaccgcatttaaccttttgtttaagatatggatactgacaacctctaaagatactggtttatttgttttcccatttttcaagctaaaatcctgaaaaatgtttagctgtatgaatggaagtgaggttatgaatttcaattgacaaaatagtctcaatatatagtcgggtttgtttacatttactcatttttagtctttattcatggacccaatcggaaaacgtttgatgtttacctctcagttaacaacctataatacaccgttacgacaccacatcaaactttatgcatcgtttatgcggtgtgagatccaattaacttcttcctttgtttattcatcttttaaatgcaaagtttatgcttcaaaaggcgatattcaattggtttgttgtatcaatgcgataaaataattgtttgtttacatttttgtagacaaatcagacgaatacggtgttgtatgacattagcgttatgtaatttatatgtaagctacgcagtttggtatctgatttaaagatacgtagaactgcggtgagttttccttgtgatctattatattacaatacacaggttgtataagtagcaactgagtataggtattgtattaactgggttataatgttacctatcactaatatagctcataactgaactgaggaacgaggttcagcagtagctctatttatagtattcagataatattgatcttaatagattatcattaagatcaatctccatatcgtatcatacatggtacgatatataattagaacatgtgacatatagtgatactcaacgtagtgtatcatagcgtagtgtagtattgctgacaataaacacgtttaagcatcaccgccatatcggtcgttgctgcttacgagatgaatctgcgacacgtgaattaaatatgactttgataggttgcactacagcagtatccttcatgatcgctttgattttaccctttgaaatcacctgctcatcttttctacactctgcactattcaattcttttaccattgtgttgaggataggaactttgtgagtcaaccaagttcgtttctcacaaactcaagcgatttacttcctttaaagtaaactactacagtgcgttgcagaactgttgtgatattaggtaaaattgttattattattggaatcctaagtggatacaggtttatgtgaacgcaatctattcaaattacgcgtttatttgtatgaacagtatgtctgaatatgttaaacctagaaaaaatgaatttctaaggaagtttgagaatttttatttcgaaataccctttctatcaaagcttccaccaaaggttagcgtgcctatcttttctttgatatcggtaaatatcgtagtttggatagttgcggcaatagtcatcagtttagttaacagatcgttatttctctcagttttattatcttggacacttggtttaagacacgctctcgatgctgatcatattactgcaattgacaacttaacgcgccgtttattatcaacagacaaaccaatgtcaacagttggaacttggttcagcattggtcattcaactgtagtccttataacttgcatcgtagtagcagctacttccagtaagtttgcagatcgatggaataactttcaaaccataggaggaataattggaacttcagttagcatgggactattacttttgttggcaattggaaataccgttttactagtccggttatcgtattggctttggatgtatcgcaaatctggtgtcactaaagatgaaggggtcaccggattcttagctcgaaaaatgcagagattgtttagattggttgactctccgtggaagatttatgtacttggttttgttttcggattgggatttgataccagtactgaggtttccttgttgggtatcgcaaccttgcaagccttaaaaggaacatctatatgggcaatcttacttttccccattgtatttcttgttggaatgtgcttagttgataccacagatggagcattaatgtattatgcttactcatattcttcgggtgaaaccaatccttatttctctaggctttattactccataattttaacatttgtttcggttatagcagcatttacaattggtatcattcaaatgcttatgctaatcataagtgtccacccaatggaaagtacattttggaatggcctcaatagattatctgataattacgaaatagtcggtggatgtatatgcggtgcctttgttctagcaggtttgtttggtatttccatgcataattactttaagaaaaaatttacacctccagtgcaagtaggaaatgacagagaggacgaagttctagagaaaaataaagaattagaaaacgtatcaaaaaactcgatttctgttcaaatttccgaaagtgaaaaggtgagttacgatacagtggattctaaggtttgaacgactgggaatttctgtttcctttttttttcttcagtattctcgatttgttctcttaacctgttgcttgggttaaaagtctttatgcctttatcatgatgaaatagaaactcggttcgatattgatgatttgaataagcagacgagccacatacattcgtttgaggtcatataggttaaacagttgctagtagcaatttatttgtgtgaaaaaagaaaggcaagcaaaatgtgaaaaatttattctttacatattttacatgataacaaaaaatcctccttgggcctggctttatgattcgggcaaaataccagggctgtattttttttaaaaaaatactgtgtatcggcattagcactttgcttactcaacttttggaggcttgaaaatgcaggtttattcaatataacatacgggtcaaatatattacccgatgtattctagaatacttttataaaattcttgacaaagaattgatttcattgggtgattcattcattgcttgactatttgattagtaaactgtcgaagaaaaagttgaattagtttcttccatttctgagattcgaacattcttcaaattttttatataaaataaaaaatgagaaattcatgagttcgactaattttgtgggatttgtttctgtttttttaattcatcaaatgtctctttaaatccatcaaaggtatcatagtaatcagtgtaaccaagcttcctggctttgctcattgaggatataacgttgtacgtcctgccgaacaaaaaatcacaaaacgcccaagtcccaacttctaaagcatgagcattgagtttttctctttctgcgattgtcctccaagcgtcttggactttcttttgcttgacccattgttgaagcgatatttggtttattattttactattgggggtatgtttaatgccgagctctttttcgtacagatttatgggagaaggtgtacttaaagtaacttctgtacttaatgtaaaatccgttgcaaattggttttttggtacctcgaccccaaaatattcggctattttaggccaagttcttgaccaactgtgaatatctccgtttacaatgttgaatttctcttcactgcattctgctttaaatgtcatccataattgaaaatcagcaattagctttgaatacgagatatcatcgaagccgagatagaacttttcatttcctggaaatcggaacggttcatgaagctccctgcaaaccaaagcatataatgctatagtgaatgcttcattcatgtagcttccttttgatactccgcaaatatcattcggcatagctatggtgtagtcccattttttaccgttactaaattctttaagaatatcttcttgaacgtagtaaaaatttggagttccactaaatgtttcaggtactcgtatgtctgtctcaatcattggcaaacgaacttctcctaaatgtaatccataaaattttagaccagtggttagaattacgcgtctcaaagtttgaatggaagtaagttctaatgcttgcacaaagtttctcaacatgttaccgttaacttcacacaacttttcttcattattttcttctttataagctgcaaagtatgcataatttattcccttaaccccctcgagagaaaacttttttgcaatatctttgggttcttcatttagcagatctatggaatgatgcttgatttttctagggtattcatctttcaacgaacgagaaatacagtgtatagttttgcaattatcatcctctgacagtctcttaataatagctgcaccatttaatcctgttgccccagtcactatagccacgtaaccttcttctgccattgtgtttctaactttgaatatcttttaagaaatctcgcatatatgaaatatatatatatatatatatatatatatatatatatagcatttatgctttaatttatacccaaattttatgatctcattcacttttgctatatcactagtaacatcatccatactatagacttgttctagtttgtgaaattcacaatagctagtgaacacatgtcggtgtgataataacagtatgatgttgcaagtatgtatggtcatatttgattgaggtatgaaatacaaaaggtattttaataatgctgactatatgtagggacgctgttagagcttagcaagcaagttgaatacagagaaatcgaggcaccattgcagtgatgccccttgcgactgatggaaaaacataacaatgaatatttatctaattgttttagaacacctgactataaactgttaactttatgggaaggttgcttggaaggttgcttggttggatggttaaaagtcatttttgaaacctcacaagctgttcgtaattagttcaaaaactaacaatctaaaataaaaaggaaataataaataaatccaataaaatccagctactaacaaaaacaataaattgttccactattaactctcgctattctagaaatttaagtgtcattaatattggtctttaaagctcaagttgctatttacaaccgtctcttagtcatcgaaataaaactaatgatcgatctttgaagccatcaattatacgctttcatcaatgtcgaattcatcaaggcatttagcaggtagagtaaaaaaagaatcgttacaaaaatggatggttcatgtcttgcgaagagattgtgaaacttttatggcagcctccgctgtagatttagcactcattggattcacacctgttacaattcttccatctacctgagtgaaatcggacatcggggtaggcgggtcaacgaactctgcaccggcttctctaaacaagctgttcagatcttgcatgttcctttctctcaaagcacttgatacacccattacaagctctccagtactattgaaggcggtaaccttcttaccatatacgacggaacgtccttctggtgacttggtgtcatctacaaaaggcagcataactggaccgtggcagacggcagcaagtacaccattgcttgcataaatttgttgagcaagcgtttgcaaatttgtggcatgtggtagatcaaacatggctgcatgacctcctgcaataaacatgatacagaactctttgtagttaattttatcggcaggcttaatatccttcagcgcataccaaaactcattatccttgttgtcaaaagcatccctctccacttcacccaaggcagattttttgattgaatggtcgtcgaatttacattttcctgtttctgaagttagttgaacttcataacccgcttctctgaaaacttgatagggaatcaaaagttccgcaaagtgaactccagtattcattccatctggataaaatggtccatagtaactgcttgccacgagaagtacttttccttctgatgccatggtgtataatgaatgggtgatctttgcagcttcacctcaataaataacaaattttaaaaaaacatcacttaattgcaaaagcgggatgaatttccattacgactactcacgtaatctatttaccaggttcttggatttctatagaaagagtgacgagggcattgtgtcaatatgatgttaaattcatcttaaaatcagatggatacgtttgaatctaaagtggtttcggcacaattctattctattgtgtagaaggacattgcgatcgctactgagaaaatgcaaatctctttgtattgtttagtgtataagtttcatcttgatttgagagatttgcttcaaggactttttgctagtttcaattatcatcatgattttcctcatacgttttaggattgtgagcgatgcgtaattaaaatttcgtagtctatgattgtgaacggaaattttttaaagtactttattactatatgaacataccaagctagaatgttgctcgtttcaaaagacaactgtaaatttgatctattcaattggagtttattgaatattcagataaaataagaggtttaagtttttttcatttacactcgccaaccgcaactttaattatattttttctttttttgctcttcagtatgccacgttatactgttttacgtttagattagagctcgaataattttataccaacaacgcctctatattcgaaatcattaaaaagataagatgtcaactacttacattgcgctataatacactgcgttgcgtatcactatatgtcatatgttaagatactactgcaccacacattagtgaaaagcacagataaactatctgtctatctacatagatagcaactattagaaagattataaatagagctacaattgaccctcgtttctcatttcagttattagctattagctatatggtcaccgatactaatagacttcatataacaattaatatacattgttagttaaatattgcataccgctatattgtaggtcgcaaataaaactcaccgcagttctatgtatcgttaaacaggttccaaacagcgtagctgacagaaactgtattttaattgtctactgaaacataaaaacagttgattgagaatatattttgcccaataaaatattgaaagttctggatgtgttccttgcttgcaaaaatttgtatttcgttctttctcttacactcattcgtaacttatacctactaaacaatcgtggcgactgtgtggataacgtatatgcggaaatatactacaattgaatttgccatggtctttaccgtgtttaattaaatgtggtttctaattgtttcatatacatttcaattgaggggatactagagaaacgtaaataatgagtatcccattttttactggagaaacaacatattcatttgcttcttgcgtgagctattcaggacattattgtgtttccatatatcccatttgatattaaaagaattattctgaaaacgaaaacattgtttactattgcactagttaaccaacgtttgtttacgctttaaagcagttttgcacaagtgcattttcttgatgttgaaaagtagactttcacagatttagatctcttttagtaagaaaaaaatagggtaataaataaatttttttaaactactttttattaagcgtttttgatgttgaggtttttaggaataaactctgctagtattatttcaaacattaaccatgcgtaaattttagtaccaacatttgttaatcatatatgttaacgatacttagcaagtcgatatttatttagtgaagtttaggaatgtcggttacggcgaagattaatttcattactgtcggctaacctcttttatttcagtatttggactaatgagccacatggatagtgaacgcttgctcttcaaacgctatttacaaagattattcatcacgagaatacttacgttgatcaggttagatttatctctttttagacgatataataccaatactatcgttggatctgttgcatatgaaacattagtggatacagtttgcgatgtctcatcgaattcgacatttgtcgtaagtagatttacatgttttcgtttttcggtcttttctaactaaacagatgtttagcttgccgtcggaagaaggtacctttaaattttaaaaatctactttaagctaatttaatcaatcgacaggtaaaatgcaatcgacagtatccttgcactaggtgtctgaagtatggcgaggcgtgtacttatgatgagcgagacaataggaagaaaaggcactctcttagttatcttcattcattggaaagtcagttggctcggctggaatcttttattatgactcttaaaaattcggatcctgaaggacgagatgagatgttaaaatctgtagtcttttccgaccaccttacagaaccaaatgaccaagaagttaaatccgaaggcccaattgagtatcctgtctttttgaatgttcaagattcgaagacggtatccttttatggaccgacaagtgcctatgatctatctttgccagatatcacaaaagacaacaagactacttggaattttcaagcttcttattctcccatggtatcagaatgcttaaagttgttttttaggtatcaatattctcaatttctctttgtataccgggagtcgttcctttcagactactattacaattttcacgatggcttctactgcactgaacatcttatttatgcaatttgcgctattggtgccagtatgtcagatgacgaaaatatatcccgccattcgaagtcgtattatgatgcttcttggcaaaaacttttagaatttggattagatcgctcccatttaacttccgttcaatgtctgttatgtctggggtattatgatattgggatgggaaatacttcacttggttggttattatcaggcttagcctttcgaatgggtcaagacttgggcttccagttaaacccagaaaattggtatatcgacaattcgcctgctatttcctctgcagattctgatataaggcgacgtgttttttggggcagttatgtggctgataaatttatcggcttcattatggggagacccacgatgttaaaacggtcggacgccagtattccgggatctaatcagttgccggaatttgctgggctcgaagagtttaaacttaacgtaacagattatatgagcttgacggacttttctgtctgtgatgctgtagctctgttcgttgacttaagtgacattgcagattcaattttattaaatatgttttcgcctactagcaagaatcgtgccactaatatcaattgcgttttgagtaatcttggaaaatataatttagagctaatgaattggcactataaactacctgatactattagttggagaaccattgatttaaaaaaagatcgcatacctaatctttgcgctgtcagcctatactaccacttaattcgcatttgtttgaatcggccattcctgtccaggaaagaagtgaccgctaacgatcttacaccaaaaactatatgtactgattccatcaacgaaatagtaactgttatacgagcacaccgtactgcaaatggccttcgatactcgacactatacatagtgtatgcggcgattgtcagttgcagtgtgattctactacttcgagatatgtgtactgattcagagcttttgacattgaataacgatatgatgtttttcattgaagttcttaaagagtgctctcaaacttggaaattggctcaaagatcgattgttctcatagaaaacacactgaaaggaaaaacgaatagtcaatctacgtctgaatttgtatctccaattagcgatactgaaaacggctcttcatctcagcaggttagcgaggctaaggacatagtagagccatcggacgtacttgatgaattacagaaatttgatttgctaccagaaaacgatgacaacttccaaacatttcaagcattttatggtggacctcctatcatactatctccgaatttatacgaaaagaagctcaatgaaaaaaccttatagttaacgtaatatttattgttagaattccctctttattatgtgcgaaccatatgttagcatggacagattacttaaattttatacagttttggacgatgcatgctgctgcattatttaatcctattttatttccacatggagagatgggctaaacgatattgccgctatatgtttgttacggattcggcaattcagtgacacacaattaataatcatgtatcaatttttaaagtaaaagactaacttaatgagctgatgattaattttgatatctatgaaaataattaatatgattagaggtcaatatagtacatcgggcatcaccaaggtattgtacacatacaaagaatgatgttatgtaattgaaacacattaacgtaaattatacataaccatgcgtttgtaaccattcagaccctcaaagagttgagaaaatgtaacatactcgtttgggccatgagcttcgcggatggaaccaggtccaaataaatatatcttcattttcctgtcacttaaatatggtatatcagtagcataggctaaaacaaccgtatccattccgggtatatcataatcgaggtattgaggaggtgaatattggatgacttttatctcagaatgctcggtgtcgaacaaatcctcggctatatcacggattgtttctatatcttctgcaactctaataaatacctcagcctttgcttcagctgcaagaatattcgcggcagcgccaccttctatagtaccaatgttaatagtgctaggccccagcaacttagactttggtaagtcagtgtccattaactttacacattgtcgaagtaaaaactcaatggcactaaatccttcttggggatatccagaatgacaagctttgccgtgagcataaacgtcaaacctaaagttacccttgtgtcctacacccaacttgttttcagtgggctctccaaatatagctacctcccaatcagcattaagtttattagcaacggttttcatcccgataccatcaatttcttcgcctacgacaaacagcagcgaaagatcaccttcttgaacttttccttctgacattagttccaacattgcaaagatttgtgcagcaactgaactttttgcgtcacaggaacctctaccatgaattttatcgccttcaatgtagtagggtaagaaagggttgacagtgtcgatatggcttgtcagtacaaccttggtgtttctctgactacctagatatgcatagacgttgtctcgcacagtcgggttagaggagacacgctgcaattcgacggttaaacccttggactccaagtaggattttaagaaatctgacacatttacttcattcccaccaagagattctatttcaaccaaagatttatgaagagaaatcaagttgtcgccagctggcaataatgattgatgtgaaataagctgtacagagtcttgttcaagtatggagtgttgcccccaagacaaataaccaaaatttaggggacccgccagtacgggtgacatccaaaggtggtagccgataactattaaaaggctccaaacagaaattttcattgtcatacaataaacgttatttttgaatttatgtacaataggcagacggttattgaactcgagcagtaatgggagtgttcatgattttatggtgtagtagtagcctatctattatctaacttccaaattttaagcgacaacccttggtaggcggtaacaatttgattaggataactaatataaagaaggattgttttatggttgtattaaaatataaacgctgaaattagtactaagtgcagataccagtgcttaagacgctgatttagtatttgtgtttgcctgatttatacatgatttcgttaatcagcgttaagtcagcgtcatactggaagtcagctcaatggaaatacttacattaaacattactatattatacaaagaggagtaaataaattttggatagtaaaattaaatttaaaaaatctcaacaggtgataagaaactgcaatgcttgtagcgacaaattatggtaatgtgctcagcttttgtattattgacaaaaagtatacagtaataaatacacccataaccctcaaactattgtttactatcaaaagaatctaacaggaaaagctattaaaagttttttaagagaaacaagtaaaacgaggtaagtacagaaaaaggctttatacgcactcaatcgtattgaagcaaagttggaacccttctgcgatctgaaacttgcaatgaagtaaaggaaaaaagccatactgtcgagacgatgtgtataatgtcttaaagaataaaactccgtaaaatattagaatattgacgtcggatatgtcccctcggttaacaaaactttaaacttcatgaatttaggaatattgcggggagggaatacattaataattcaaacaataggagaaagaaatctttgacggcacactcaagaataagtcatggactacggactaaaattatcaaatttctcagtaacttaagttgttttttcgttccatcatcttacgaagtagattggtttaagtataaatagatcgattagatctagtgtcatttagatttgttttccagtatttcaaggtatatcttattgccaaattttactcaaattttgttaaaattgaagaaaaattggacatttcaattgaatgctactgggcatatccaatttacgatttccctaaggttctgtaagatcataaaacacttttcttttgcaaaccttcataatttctattcactcatctctggaatcattaattatactctccctactagaatcttgtatttgtaagtttgctattggtttggctatgttgagtgaagtgcctgcccttaaaattgggatacttaaaataaattggaagtaacatcagctaaaatatttttttaccttttatgaagtaataaagtcatcggaaatgcttgactatgcacatgagaacattgccatagatgattgctggaagacgaaggagcgtcaagccatcactaattaactaatggtgaatcctgataaaacctcaagagtggtgtgttttcatggctcaggaagtccataattaagtttcaagttgatatttttccagtactgtaaatatacttgctgtggctatgtaggatccctcgatcatgataaacaagacgctcacgtctgcaaattgggttgtcaattattttacggagaatcttgctacaaagaagttagtgtcaaaaactctttaattaatttcggcaaaatcaaagatgtcaaatgccctcaacggaactagtcgtcccatttttttactctcagtgcctgcaattgaggtagcacaattacaaactcttggagaaatgtcgttaaaatttttaataaaattaattgtaaagatgactgattgcccacgtcaaagcttcagctgtagtgaattaattacagttttacctactgttcagaaattgacattttagcaacggctgttctttaaggacaaaaagctacctcttctgatattcttgaagttataaaatggtataaactgccaccaaattcactatgtcggctttctatgataattcctctaattcttcacaatgatgttacaaatacgcctcaagaagatttctatcatcatcagcaaagacgttatatctataagccaagactgaatttaaaactatttatgaatgcatatagcgctaatgatgtcgatggagacactcgagttctcccaatgttttttaaataatgacagggttgtttcgagtatgattattacgagtagttcatgttaatagttattcgaaaatttcattgataaaccggccaaacctcaactggctttgaatactagagactaaaggaataataacaccatgagtgacaaatttattcaatataatatttcggcttgttttacaaagatacaaatactgcaaaaaacataaatctaatgcacatgacaactggctttaaaagtgctaatttactgttgctagctacataagtaatcgaatatcgtgtgtggctcatgaatttgcttttaagctttcctaattgattacaaaattttaatcttcctttcctcatctggtacagatattaagaaatttacggcagaagacttggaaaacacaataagccttagaccttatttatatgttaacctaatatgtcaagattgtttgctttcttatcaatgttatgtgcttattgaggttaaaatatatatttcctaattaacatttatcaaattaaataaatttctaacggcattacacatgtctcgcattcaaagaataaaatagtagtcatccgataaacctagctgactcaaattttttacaaactaatttcgcataagcgcattatgagcttccttggaacatatggggttcgcccttgttaattggcttgggggctttttcttccatcttcttcacttcagcttcagtagcctcacgaatacggcgaccaagctctgaatcaacacgagtaaatacaccgtattggcgttcacgtacaggagatatagcaccagacaagtgaccggcaacgttcttaacaaagttatcttgctgtccaggtttcttgcccaaaacattttgccaaaacgctctaggttgctcaaaatcaacgtcggtaatttcgtccatatggtaagtaacttgacctacccacttttcgtgaccttcgtcaggctcatattgaactttagcaagtggtcggattgaggatggatagtttggccaatttccttggtttccattgacattcatagggccgtcacgagaatagttaaagacaggacacttaggagaattgacgggaatttgctcgaaattagcacccaaacgatggcggtgggtatcaggataggaaaatgtacgtacttgcaaaacaggatccgctgagacttcaataccaggaaccatatgagaaggagagaacccagcctgctcgatatctgcaaagaaattggtaggattctgattcaaggtaaagcgtccaaccctttgcattggtacgtccttatgaggccagaccttagtaagatcgaaaatgttgtagcgatatttttcagcctcctgaggggtcataacttgaacgtaaagcgtccaactggggtaatcaccacgttcaatagcttcgaaaagatcttgacgagcatggtcgggattggatccatccaatgcagcggcttcttcatttgttaaacccttggttccttgattagtaatgaaatgccatttgcaatagtagaattcacccttatcattaacaaatttgtaggtatgactggaaaagccatccatgaaacggtagctataaggggtaccacccaagtcagagaaaagaatcataacttgatggatggactctgcgttttgagaaaggtaatcccaaaacatagtagcatccttcatatcattttgagggttacgcttctgagtatggatgaagagagggaatttagcgggatcacgaaggaagaagacaggggtattgtttccaaccatatcgaaaataccttcatcggtgtagaactttaatgcgaacccacgaggatcacgagcagtatcaggagtacccctttcaccaccgacggtggagaaacgagcaaccataggggttttcttaccaaccttagaaaacatggtatgtttggtatacttggtaatgtcgtcggtgcattcgaattcaccaaaagcaccggaaccctttgcatggacgacacgttcaggaatacgctcgcgatcaaagtgttgaaagacgtcgattaaatgggaatcttgaagtaagacaggacctcccttacccacacgagccgcagccatagggttaaaaatgggacaaccggtgttggtggtgtaaacagggacggtatttgagtctttcgagttcatttcgctgatgtttgaatccttagactgagaagatgcaaatctgttaaagagtagcttattattgttaatcttggaattagttgaacgacgagcaaatgattttaaactagcttgtctaccaagacagtaacgttcaaagatgcgaaaagccgacactttgaagagttaggaggggaaaaaaaaagacagtcaaaaaattgtgtttttttaaaaaattagtgtcgagtctttaactaaatcactcaagacacaaccacaatttctataattcgatattcgaacaagggaattacaatcacacacacacaaagaagaacttatagtattcttctattcaaaagctattacttttacgtgaaaagctgtatattcaagcaacttgcaattgcctctatatatattgtctggtgtagaattaccaacgtcatatttgcacaataggaaaactcttaccaacgcaaatggccgagattccattggcttagtgagccaaagagcatcattattagcgaagctacaatgacaaattaacttcttctacagcctatcgtagtcgccaaaatccacccttcagccaatgtttacgatgcgctcataccgttacttggccatatcaaatctcccaacaccatcgctaacgtaagcgggcaaatcccatcgttagcgattagtaaaaccagcgtttctagacacagacgctgacatgaaattctactgcaagtcgatatagaggagaaagatgcttaataaaattaaaagctagacttttcagtcgcaaacttgtgctggacatgcaccctttggaaccagtgtttttggtagattagcagagtatagtgtgtttcctggggaagtaaataaaacagatgtatggtaaaataggatatgcaagcatgtagattttggcctgtattcatgcggtttgtttagcttgaagaattgatttcacaaaagtatggtttaatttcaaatgatgtcgggttgatgtgctaagatcgggaaatgggtgagtgagaaaaggaagttatggtaattttatgatcgattagtttggaaacgtgttttatgggcgcattgtatatttcttaaattataaattttttctattctatattaactgaactgagaaagtggattcattgtgcacagcttcccgtagaggtataatgtgcacaaatcggaagtatgactaggagagtgaaatagataaggaggttactgaaattagaatactttcgtccaatatacttaggagtgcaagtctaaggtcgaagaaaggctggaagtgaaacaagtcccttgcttacaaaaaaaaaaaaatgggagatgcaaacaatctaaggaccgacaaaccgtaggtatggacggcgtgtaaaggcaatccgtaggaatgtgtgaaatagaatatgatacgtttaataaaagtccttcttttcctctacatcacaaatttcaagcaaaacgaagtaataataataaggaattttttctttcgttggtctgactaattttttaggttcgatataaacactacgatttccatgcatgttttaattcagcggatgaagatataacccatacgttgttgtttcccatcgctcactctacattcgcttaaataaactactaccatttgactcgtcaaacaaagattgaaggtggtattcacaagcttgttttatgttgaattcaatttttagttggtaaaagtactttaagcataaatgccattaactgctgttcatgaaagaggggacgttataggtggcagaattaaatttcactatatagagaactatagtgttttttggtcatcatcagtaagtgcagaaacagcatcaacttagtaaacaaaatagttacttagatttcgctttattctttatttccctctccaagacttcacaaagtcctcgaaaattcacgatgctgatagcttcagcttttcagcaccattttttcttacttgagggcgagttgattaaattcatcctctgcaaatccttcttcttttatcttttctctctagaacgtttgaaaaattagttacacacgtccaattcccttagttggaattcatacctgttgaaactcttgcaatgctgctaaacgccgttgcctatgagaataataagattggccaagaagaacagtgcctccaacagtgccgaaaattagaatcgataccgatcccttttgtacaatgtcgtaaattcgatttctgttcataacactgacctagtagttgttagtagtcgtgtttgtcagtttaccacattacacagcctaatcgcttcagtaaacttactgagttttctttataatttaatatgttgttaatgattattagcactgatggaatgtgctcttaaaaggtcacctttagtggcaaagctctttacagttgggttttgtagaaatgaggccttcccatattctaccggctttccgagctgtaccatgacgttctttaaaatgattaacaggaggtttgaaagtagtgctaaattacgttaaaactcaacatgattaattcattcgtctagtcatcactgctcggctcactaatatcgttggtaagtaataaagcgataaagggatcgaattattattttaaaaagtattccggtgggtgatactattcattcattattagaaataaatcgcaagcgtttgttgtaaatgaaggtgtctcagttatttcctggataataaaagttgaatctcaaatttttttcatctcaatacttaaaaaataaatcttgttactgagtgtcatagtcgctacataggattcataaactgcaacttttatttatctttttctaagcacattagctttaaacggatccgtctgccgccttgagtaaatcagccaaagatttataaagccaaattatttggccttaatcaatgtatcgagtcaagtctagatgtagcctgttcagtaacgaatttgaccccatttttccaagagaaaaaaacggccggcatttacagagtacaacatatgaggtaccaaagaagaaatgtaaagtttaaatgaaataattcaatgatgaaaatgatccaatatgacgaaaaaaagtttctatactattgaaattgaagaaaagaaagcaggcaaattttacgtgttgaagtatgtatacgtctacctttatagaggattacacaaacgtttactttggatttcattttcaattattttcaattttcttgatcatttttggtcacttttgtcaattctgaaatacgtttgctcttcatatacttattgttgatgtactaagtagctgagcatttcggtaagtcaagcaagagcaaaactgaaattgacgaaataaaaactgtctcttattagtaggaatagaaatagaaataaatgactcacaaagccttaagaaaatttgttttaaaatcttatgaactattaaatttcaaaggttttgtttattttcataatcgtcgattggtgttcctggtatcgatattaaaacagcaactagttccttttcatatcacggtctagctaattctcgaattgcttctttttgaatgttcttctaggatttactcttgcttgtggtaagattgcaacaaatgacaatgagcagtagtaaatatagtacagtgcagatattgcttttcaaattaaaatttaggtgaacctcaaacatgatttcatttatggcatgaaattgatggttacatttcatacaattatcagagatattaaagtaacactaagcagttcatttcggtaagttttcgatcatctttattatcaagataaccgaaacaaccttagtagctgcgtcaatacactcactactcagtgacaaaacaaaatttttaggaaaattaagcctttgtcgtttcttcctccaaagtcattttcatgtttactatttccacattgccaaaattgttagtaacctctattacgtggttataaaaaagaattaaaatatatccaagccgacttagcaaggatatgtcttttcataaactcacatacggttttcaacccgatcgtttaacatcacgattctaaccctatacacctaatacagtgggtaaaacgcaaagtctctaaatttgatcttatgcattccatacacagtttagtcaaaatcttttaaacctatacaactgacgtaataaaaaagacagcaatatataaattaaaaattcaagccatttcaataaagcttgaaaaccacaaattataacgaaatttactgtaaataagtctaacgccttaatgtgaataaaacgattgttaacgcaacagattcgacgcaaagtatagtagataatttaagcaaacttgtaatattggagtaacttaggcctactcgatcaagagtcgtcttttatatcaacttggaaccttatagtggatttgtttttgcgcacattgcgttccttaacttgcttcgctagtaagcacacacactcgtagcagcacaaatttttacggtaatattttggatcgttggatacacatatttaagagactttaaaaaaatgtcaaggcatctggaaacctcccttaataataaagaatttgttttaaattctctagagaaaggtcttcgattagatggtcgacagctgtcagatttcagatctttggaaattcaatttggaaaggaatatggacaagtagatgtttcatttggtcatacaaggtatatttttctctttttttaataatgaacagcttttactaacaagtactgtagagttatggccaggatcacaactgaaattacaaaaccatatacagacaggccatttgatggcatcttttctattactactgaactcactcctttggcatattctgcatttgaagctggaaggtaagaaatgatctgtattgtacttttacttttgtcagccgaagggttgattcagtggctgttttttttttccacctaacaacatactaataatcacagagtttctgatcaggaaattgttatttccagactaattgaaaaagcggtccgccgatccaatgcattggatacggagtccttatgtataatatccggtcaaaagtgttggcacgttcgtgcttcggtccattttattaatcatgatggaaatttagttgatgccgcttgtatcgcagtaatagctgctctttgtcattttcgccgacctgagcttactgttgtgggtgaggaagtgacagtacatccagtagaagagcgtgtacccgttcctctttccatattgcatatgcctatatgcgtgaccttcagtttcttcaataatggcgaattagcgattgttgacgctactttagaggaagaggatttgtgcaacggaagtatgactattacactcaacaaaaatcgagaagtctgtcaaatatacaaagcgggaggtattatcatcgatccttctaaaattatatcttgtgctaagaccgcatttgatatagctgtttcggtttgttctgttattcaacaagctttagatgaagatttacggaaaaaagagacacagtatttaggaggttcggcagagaacgagcggtcataatgctagtcttttacttaaaaaaaataaaataaactaatttattcattcgtttaacaaaaaattctaattgcattcgagttcgtcgtgttgctgaaggcgtcattccgctaagttcaagtactaaaacaatgctttgatggaatgggatgatatttctcttcatttgattaacacttcgctatcctttttgtatttaaacctatattgacctatactaaatgttggcatggaaaatccttgtacaggaaatgagaaattaggaacgcatcttgcactgaatatagctactactatgtactactaatacaagttttttgtaagacataaacagtgaatgccacaagactatttgctcttttatgtcctgaaatattccagatattttaagattattttcaaaattctatgtaacaccgcagttcatagaataatgtcaataaaaaaagagctttatcacgtcctttctcatcaaaactaaaaaaactaaaataatatacgacgctaaaaaataaaaagagaagagaaaccatcaaaccaaccaaatccgtaaagactagtttaaaagcaaatttgtaatataatgaaaaaaggtatgccctttaaagtttaaaagcctttgaataaacgataatgtaaacagctccaatattcatgcaacaacgtatagagctgaaaagactaataatcaaccaaatatgctcaaaccaataatctgaataacgtaaaaaaaactaaaactactttcctataattaaaaaaaacattttttctaaaatgaacaaaaaagtagaagatgcataaaataccgatgccggattccaaagacgaaatgtattgatcccgagttaaatcaccaaaatacgtatctacgatgcgagacaatctgaaaataagaatcaagaatataaaggaattgaattgctaaacaataacgaagactgcacaagaaccaaataaaggaaataattaagatagttaaaggggggatagaaggaatagcttaaaagggataagttataaacctgctgtcaaaagagtcgagtaaactaaaattaaaacccactaagtgaatagtgccaaaaattttaaaggaaaccaaataattttttttcagtcctcaaaaccttcgcgtgtttcaatagagaaaactataagaactaagagacatcacacatttgaaggcgaaaaagtagtcctaaactaaggaagcaccactccaaaagtaagtaaaaaaaaagaaaatgaaaaagatatatgaatcctaaacagacttgaataaaatgtgacaccactagttaaactaaaccaaatttttacaaaacattgatgaacgggaaaggggaaaagcaaaaggataaactgaaggagaatgagcaaagtaacacaagtccaaaaaaatctagcaaacaagagagaataccttggatgcaaaaccaaagtacgaaggcaagtactaagagtttaatgagaacgacgatctttttccatttctaattgctggtagagtaagaaaagggctttctcattttcctcgtgtgtacctgtaatggtgaacatacgttcgcctgtctcatcatgaggttctttggcaatggaaatcttgctaccgctggtacgacggatttccgaaatcttagatcctccacgacctattatacaaccaaccatatctgcgggaatgctaatattttgggtaaccttaggttgctgcaagaaaggcatttgggtagctggaaagacttgagcaccgtaagaaacaaagttttcggggatagcttcaccagaagtcgtggagggagctgctggaggggagacttgttgaggagatgcagtcgacgcaagagaaggaagaggttgagtcaaacgagaaacgggattatagaaaacggtaccggcgccacgctcccagtcatcaattaagcatttgccaatttcccaaatggcagcatgaagattatcgactgtaccatggatttcaactgtacgctcagtagactgtggaagcatgtctttggaagcaatcatacggcaactacatttgtcctgaataagcttgatacgcaaaccattgcggccaataatactacccatcagagaatgggcgatcaaaagacgaagtttgcgaggtgtgttggcgtcggaaggtgtaccatcagggttagtactgttcttggcaaaaatatcgatgatgaatctataagcgcgaacaacattctctagtggtccactaatagttaaaacacgatcatgaacattaggaacagccttggtaacgccggccttgacatttgtagtgcttctgagttcggcaacgttttttccagctttaccaataatgataccagcttcacgagtagaaagtaaggctctcaaggtaagttgttgagtagcataggtggcatcatccatcggtggcttggcagagatgggaggcacttgagacgttggttcgggttggttggtcatggactgttgaatagtagaaccgttagtaagagtcgatagaggtgtagagggctttggagtaggtatggaaactttagcaatgccagtagcagtagaagtggtttcgtcgggttcgtcttgaaacgttacgtcaaaaaaagagttctctttttcctcgatgtttttaggaatgctgaagtgattgtaagccatagatgtcactggaatagtattggttaattgaataggacacatatgcgtttctaggaggagagtagaaccttttctaaattacttcctgaaaactgattagttcaaacctgcagggatttagcggagattaaaaaaaaaaaggaaaacggattaggctccttctaagctcttattgcagtttcttataaattgaaattgcaatcaatagctgtgattacttcgacaaaaatgaagtaaacgaccaaggagaacggagtagtggtaaacggggtgtagcagtgacaaagagaaaattttctgcaagtaagtcttttggtggggaaataacgaagtttgaagaacgtatagtaaagtcgcacaatttactgataggaagtggtagcgtagctttacgcctcagtcgttatatctttggaagtgaaaatgatgagattaataaatgagaagagcattacaagaatgggttttttaaataatcgtaaatttcctagctaaagctaacgaatgctgccaagtgaaatatcattcttttagtcaatatagcaggtattaacgtagttgttttcgttggcctttgcttcggtatataggatagcgtggttcaagcgactttgtaagatcagatgaaagataaagggcaaaaacctaaatagcgtccatgcatcagtggaactttctttcttcagattacgttatatggtatagtgagctttgaaaatcgttgaaaaaattcgaatttaatggtgcagaggcaaagacgatatggacgttcggaaaaatgaaaactatactggaggaagttatctttatttgattctgtcttcgtaattaagcttccttcagcttcgaacttttcatttcctaattcgaatacctatttgttcacccgtacctctttaggtttatatttgttcttgcaaactgttctgcggcgatatgaattttgctaccccaaagtttacgtaagccaagtttgtcgtaaataaattcgcaaaaaaaagtactttggatggtgcaacatggaagaattgaacgccgttgaaacgctggtatttttgaacatgaagtatctcagtattcaacccaaagtcataaaaattcttgaacctttagctttccaagcgctgaatgagcatactgggacacattttgaaaccatagacgcaagtaataattgcgtaagttatataaaactcatagagccaacaaagctagtagcatttacttcttaatattatattgaaattccaataaataatctttgaatatcgtttgtatgaaatacccgagagcaattgcggcgctaaattaaactgaatgttcagttaccaagatttatgtcacttcatagaaagatataatatcacagtagcgtgtaccattcttctatacctcactgaacgaggaagtctacaattctgcttggcctagcacagtgttagcgagggtgaagaataaaattatgatgctaattaccaaaacggtgatttcaaaaaaagttgaggaactttcatattttcattttttgcctcttataggacgctatgtattacgttgcgtaactttgacttttgcaaatacttggatgtaccactgtctccatgtttgtttgttggtcaatataaaacgtagtattagacattaaaatattggtttaattatttcatttagaaaactcaatagaaatttagcaaatatcgtcaaccaacctagattgatcctgtttcacgcaattcggactatatgaatcgtttttgattgctttctagacttcatagcattattacttacccttctacttttttaataccttcgaaattgtcaaattgactcattattgcaaaaatgctgtacaggctctccgaaaaacagcagacagacttacggtgtaataaattaactgtcgatggatttgagctggtaaaaatgttaaaggaattacgattacataacaggaatatcaattttttggaatttcttcgaggtgtacagattgtgccgagcgacagtgtcttcttgggcgaaattgatgaaaacagccatactcaagacaatacaactacttctatcttaaaggagaaagagctatatgatggtattcctctgcttccatcaatggcaggcgtatccatggaccctgagagagaaaaaaaatcagagttacgactaatgaaaaaccaaatcagcgctataatcaatatactcttcacagtagtaggaacggtgaccgctgtttggtactgcacttcatctttatctattgaaaaggtatgaattaaaaactttcgttttgttcctgggagacctttgtattgacttaatattatttagaaaattgcgctatgtgcgttttcagcaatcttggttctagtagcagatacgtttctttatgtccgctatctatctgcacaacccgtacgaacttcaaagaatcatactcgacaaataatatatacatggacaacaaatgaccctgttctacagtcaaatgagcagctagctatagaactgggagccattccatctttgaaggaaaaaaagaaccaataattatattcttaatttttagatgttttattaacgaaagtacctttgatgttttcctgtagatgatttttataggttgtttgtctaattgatcataatggcatacctctctatgtgttaattgaagggcaggcacctatgggcacactatagataaaaaataaaaagtatttaagataaaaaattcgaactcatttggcttttaacgtatatttcatcaattaatttcattataattaaagatttagcaacattatttcaatttaattagccatttggtattagatttatttgtaaggaacacaacttacaaatttataaataaacaacaaatcaacccccccttgtaaaaaaattaaaaaaaaaaaaaaaaatagagagcaacctaaccattgagttaccagtgaattatgcaaggcgcaacttgaccttaagtttcttccatataatcaatagtgcaagcacagacataacgtttaatattaagcataccgcaaaaaaaacaacaggtgagaacgagcgaaatgcaccgccaaagatagcaccaactgtgtcggataaggaaattgatatttgcacagcgacgttacctatcaggtggtacttaggatgtaaaacctttgtcaataaagagaccgaaggggaattagcaatagaagatccaaaaaaaacaagggtgtaaataataaagtaaggttgtacgaattccttgcctgtatagtgaatagttatatgaataaccatgcatacgatgtttaaacaacaacccaacaatatgatatctctgtcagtcaagtaacgcgtcaaataggaaaatattaaaagcaagggtacgttgataattccagccaaagaaaggaagttacctgcttggaaggatgaataattataaagcatagaagtgtaaattggaacagatgcttggtatgcatttaatagaaagtaagcagagaagccagagaaagcgacaacgaaaataacaagacaccccacaaatcctagttttgaattggtatcctgtttgacatcattaatgacatgcttctcttcgactacttcttcctttacgtccgtttgcgggctcaaaacctcccggaaacaagcaaagccaaacaaaaacaagcctacccaaatgaaagccattagccagttacccgaagtatattcattccagatatcgctttgagacttcattgaagacttggccattaatcctccgatgaatggaccagctgtcaaaccaagcgttgccatgactgagttgaccacacccatcgacgttctatatttgatgctgatcaaggctttatctgtgaaatagcgcttgtggtataaaaacatggtacacgcaacacccgtaaaaatacgactcacaagaatcaaggccacacttttggctttatctgcgagtgcatacatgatatgaccaataatgcagcttatacacgacattgtatatggtcttctataaatcgtatatcccttggcagctttcggagtcgagaatctcaacatgggatacagcaacacaagggcagtgattgtgggcaatccgataattacaccggacaaaccatttcctccccccagatgttggacaaatctctcggacgtaggaacgacaatggtgaatgaaatgcaaagaattgtgttatttaacagcatcaaagccgcactgatgaacggtggtttatgcgtagcagccggtgaggcagaagggtcattggaaactaatcttacagattgcttgtatcccgacttttccttttcatcaagaaaggatgagaccgagaggtctttttctaaattactttgttgctccataatatagactcaatggatccattcaaaaacctgctctactacgaaaactggcctgtggaataaggtatagaaggaacgagaaaacaaagagaaattctttgttgttttcaaatattttggtgtgagtaaaggaagaaagtggaatttcaatagaatagcatgactcgtttattttatatgagatcaatttttttaagttgatgatatccgataattttcatcatcgtatagaatggataagaattcccaaaataggatatccacggtgcttccctaattaagctttccgtagtgcggagtattttaccatatatcagtcattagttgtacggctactgtactagctcacatggtccagtggttaagactcatcgttgtggccgatgcgacccaggttcgattcctggtgtgggcagtttatttatttgttcttttttaaattattaattacttgtataaataggaaataatcagcgagagcaaatagtacaattcagttatggcaagtacaaaaacgcaaagataaatgcaaacgtagaaaccggtagacatgatggtagaaggagaatagaattatgataggatatgatgataagtatcgaatagaaatgtcttgcaaagtgtgtttggcagataagcccatttgagcggtcgaatattttatgctttttttcagggccagccggcaagatcacctgtctatttgtccgttggcagtaagcgtttgctcaagatatggatgcgcttcagtacttgaagatttacagactgttcgggacggaaagactcatgactgttcgggtcgatcattttggctactatccgtctgtctatgataaccagtgtatgcatggaaaaaatgtatcgtaaatcgtttaatgagaatagggcataaagcgttattcaacggatgaagaaggaaacttgacaatggcgatgttgaaagacaagctatgtgagatagcagattggttccttgcagtacaccagcccctacaaatactatgattcttttaacttaaacatcctgctcagttccttctaatcaatacttggttacactagttttttggcataatgagttctcaaacatgctttacaatctctcttacattgtactatgtatgatgaaaatccaagttttgcatatttcgcctagtgcacactgcccacaaccttttctcttgcacacgtaggtggctatgaaagaggatcgtctgtgcgcctcataaatatcgttattcagcatatcaagtttttgcagcaatgtttcatacgacgctcaaacatcctacctagatattgtttttttgaatttataggccaaaatagaatagaatgacaatttgctttgtactcaccaagtccgcgcttgtgattactttgtaatcatatatttatttatttattattcttgttctattgtttatttactagtgacctcatcttcctttcctgaacatcgcaatgtttcctcatctcttcttccctttcccatgtcctcgttcctaaagttaaaatctttgtttatcgacctattattaataatcggtaaacaagtttaacgcttgttcttacacctttttatgtgtatttacagccgccaaacgtggcttattcaaagccccacttgagaaccaatgcgagcgcatctggaaaaagggctatcggtaacaaacagtctcatcttacgtcagcctaaatccgccgaagcagcgatcggcctcgtggttgttacctagctgccatggcgatatttgtttacattcgtgctcgcagtcatataaataaaagatcctcgctacactactgaacctctacacatctaacattttgcatatttttctaatatcctccctttagtaggctatatctaaagggtttgatacccgttcttcataacttttctttttctatcttttttgtttcgtttttttggtttcttttgcgtgccaaatttttggtctttttgattttgcatttcatttctatttttcttggtttccccattttttggttttgtatgagtgtgctcaatcaacttgtcaaataatttcctcatcgcataccatattgattaacttttccttttctttttttaatcgtttttttttttgcatttacattcccacttgccaaaccgagaatatatcgcccggcgtttgattttgtttcccatattttcctcttcgacacgagcctttccttgttgccttcttttgttttttgttttttttgtttgttgagccgtcatttctacaaaacattcccttttgcatttttcatcgcatatatagcctaaaagttatctctcaaagtgccatctattttttggtttcttttttttttcagattattcttttttaatttgaattctccctttctctctctctatttcaatcacttccagaaaaattagcagaagtatggggttttctaaaatagcacttttttctttattcgcgctcttcggccttcctacctctcttgctaaaagcagtgaggaatggcgcgaccgtatcatttaccaggtcataactgacagatttgccgttgactctgataatacacccgattgctccttcgatgatagttcttattgcggtggtacatggagcggtattcgttctaaactcgactacatccaaggaatgggattcaacgccatctggatctctcctgtcgaaaagaatcttgagggttcttacggtagtgatggtgaagcttaccatggttattggaataccgatttcactcaattaaacgagcattttggttcggaggatgatctcatcgatttaatcactgatatgcacaatcgtgacatgtggatcatgtttgacgcgttggccaactcaatggccattccaggacccaccgataacatcagctactcgaatcttgtgccttttaatgactcatcctacttccatccttactgttggattgactatggcagtaacaataatacagatattgaggattgttggactggtgatgacaatgtcatccttgccgatttagacattgagtccacgaatgttgctgattatttgcatgaacatattcacgatatggtcgagcgttatcagattgatggaattcgtatcgatgcagttaaacaaatgaatcccgaatttttccccaactacacttctgctgctggtgtttttgctattggcgaaatgtttagttacgatcccaatgtctcttgttcagtgcgtaattatctcgacagcattaccagctatcccattcgtcaaggaattgaatttgcatttaattatactggtgctgcatttgaatatcttcaggagattgatacgcaattccagcaagcttgtgagggacaagatatgtcggttatcggaaactttttggagaaccatgaccttccccgttacacctctattaccaatgatacctcacaagatattggcgccattgttttcctccttctgcatactggcattcccattatttattatggagaagaacaacgcttgcctggtggctctgataccccggaaaaccgtgccgccttgtggaattacggctatgacactgatgcaaattattaccaaaccattcgcactgctattgctctacgaaaacaagctataagtgacagtgattcttggaccacagattctcactcttatttggactacgatctgcgccatgctgtggtaagaaaaggtgatgttttgggagtttacacaaactacgagtcaagttctgacaacgttacttatgatgtctcctctaattttgatgatggtactgttttgcgcgaggttttgagcaatactactacgaccgttggctcaagtggagcattgcacgttactgttgtaagcggtctacctcaggtctattatcctgaggctagtttgacttcctttggaaacttcctaggaacggccacaagttattcttctgcctcggcgagctatccttctacttcgatgagtgcttcgctttcatctgtgcatacatcatctgccacatcaagctccaagtctagctctagctctagctccaggtccggctctagttcaagttcaagctccaggtccggttcgacttcttctagcggctctagccataccatcacttctacttctcaaagtgtgcacacgagtggatcgtcgacatctactagtagtgtagcggtcacttccacggcatacagtagtagttctagctcgtcttcctcaagcagtattgaaagttctgctaatgctgttcgtgtatctatccttggcgttgcagcattcattgctatcgttctattcatttagttaaaaaaataattttatggaaatctatcttttgcatctttaataatctcaacgcatgcttaaactttcgtattcgctacagtgttacagtgtctgtttaagcttgttgtttttgctaactataaatcgtttcatcacaataaaacatcatttttgcacacattcaataaaactagtgtgtaggtgcgtttacgcgtaatagtctgtaaccgaagggcataatgtatcgggtatgttagttgtaaacatatttcgcttttatgtaaggatactgagattctatcatatgcgttcaaaaaaaatagtgatattacgattgcttgttgtagcttgcagctaacgcaacctgtgtcaaaaaattgactgtacgacaaaaaatatatacctagctttaggtgcacaaatcctctacttcatttcaaatacacatattggtaaagaaagtgttagtattagttgagttatctgttggaaatatgacatttagagggaaactatcaaaagacccaaatggagcattcgtttattaaaagcttaattttaggcgaaagaaattagctataacgtttgtataaggaaaaaagtattgtgtatcaaatcgctagatcgaacatgcattgtaataacagcatatttaacagtgaaattgaccataaatctcaaaagaaggattatataaattgatctttagtctttaagagcaaaagcagttaaacggttttgtagaacaggtagtgaaacgtcaataaaaggatcgaattttagatattcaataattagatatttaaattaggcaattctctgtttagtatttgacggttaactttacagtacattctagtgaaaacctaaaggccaccagataaccaactaagtaaatgtgaatgatacttataaatttttttttattcgcttttagcaccttttgaatttaaaacgatccacgtatctcgatagctgtgtactaaaatatcaaagcaaaagtaaacatctttcagtatgatcactctcaaataattacagattattcggtaaaaaaaaaaattaaaaaaataataatatatatatatttaaaaaaattcaatttgttttcaagcttgtactttacatagcaaatactaaaatttcctacaagtgccgatatcacatcttaaatttgttgaatgctatatttatgtagtacactcttcaaatttgtaaaaaataaattataacaatagcatcgatatcaataataaatcgaaaataatagtaattagttgaaacctcgattaaaaatacgatatagtttgtacacttgtaaagtacattaaaaatttttgaattaaaaacattcacctgtttttcaaaaataaagtctcttgaaggaatttataaacggactcacaaacacagaatcaactactgtaaagttaatttgtagatgaataaataaatgaaaactgcgtatctcaaatttcaattttcgccaaaaatcgcatgtaatcatgcaaaacaaacgaattttttaagcgggacgaaacgattaagctataaaaaaagtggcatcttttgtaataacgtggactatgcatagggtcaatttatcaacaagaaaaaaattttttttctgtcaaactcaaacccaaacagggtaaataaccaagttttcttaaaaatccttaactccataatctctatcgtagccctcagaaaccagtatttacacaccctcctgcacaatagcgtaagatagtaataagaaagtatggcaagtcatcttaacgagatgcgatattattagataaaacactcaatctagcaagcgaaatatcggatctcaactggtatggtaatttatcaaggaatttgggcatattgcttaagtaaatttagacgactgtacgtaacaaaccggggaatgtacgcgaagtagaaaagatacgaaaaatgtctgatcacaagatttttttgttcatcagtagtccggacatttcgatttgcaatgttaagcgatatccgtttgtgaaaccatgcgaaaatccattccaaaaatctatgcgacgaacactttgtgagtcatattgactgttgaaagtagtgtactgctgcacacaatgttcgttgtcattctatgctagttattgagatatgttggtcaactttggcataaaaaaattttcagttcagactaaaggagatatcttaactccctattataggccatagcactcaggacaagcgattatatttttttatcagttataagttaagcgacattgataagtatctaacagtaaggttagtagagtaagggaattttatgtcagaaaaaaagcacttgattgctcatagatatctaaagaggcaacagatatttaaaaaagaaaattttcggtcaattacttggtataaatgaagctcaattcctttcattttgaaaccagattaggatttggtgttttcattgctaattttattttatttttttatttccttttcattttacctcgaaattaggaaaataagttgtgctttgtgagcaaaagcaagaccaattaatcaatcgtttggaaagaatcgctctataataaagggatttgattatttattgttatcggtttcttaaatacttcctcattttcattatctttttctaccttgattcatcgattccctctctactttatacattgttttaattatgtcttccatcacttcaagggtgtcgtcgcgctcctctcatgagctgacggaaaagaagtctggtgttaccaatgatttcaaaaattctttcgaagtcggcgaagtcaagcgcttgcccgatgcagaaggaaccgcagatgcggtggctcaggaactgcttgctgatgatgattttacttatactgcaaaggaagcgaggcgtgtgttgtggaagatcgacttggtcatgatgccggttatgtgcatcacatacatgattcaatatttggacaaaacagccttgtcttatgccgctctttatggtatgaagacggacacacacattgacggtcatacgtacagtagtatgactactctcttttatgccggctatctcgtcgctcaataccccgctgctattttaatgcaaaaatgccgtctttcttatttcatcttctgtaatgtctttctctggagcgctatggtctgccttatggcggcttgtcgaaatggtccatctctgctaggccttcgtttcttagctggtatctttgaggcttctattacccctgcattcattaacatcacagcaatgtggtatcgtcgtgaagaacaacccatgcgtactctatgttggtatgcgtttaatggaatagcccaaatcattggatccattctttcttacggtctcggtcacattcatggaaaggttgcttcatggagatacgttttcatcgttattggtttaatgtccttaggatggggtgttgtttttgtttttattcctagtaatcccagtaaagcccgttttctgtcttctcgtgagaagcgtattgcacttgagcgcgtccgtgacaaccgtaccggtttggaaaacaagcagttcaagtggaagcatgcttatgaggcatttttggatccccaagtcatcatgatcaccttgtttactggtgtttgtatgatcaccaatggtatcggtgtattcagcactttgattattaaaggtttgggatataatgagcttcattcggcagttttgaatatgccacttggtgctattgaagtggctgctatgttcatttctggtgtcttgtgcaaggtctttaaaaatggtcgtcttttaatcggtgtttttatgaattgtctcaccctagctggttgcctaatgatatggaagattcccgattccaatccttatggtcgtctggtaggtgtttggtttaccatgtgggtgcctgcatctagtgctctgcttttgtcattgatttcttccaacgtcgctggttacacaaaaaaaactgttacaagtgcaactgttttcgttttttattcagttggtaacattgtgtcgcctcagttatttaaatcgggtcaaactcctgagtatatcgaaggtattcaagcaatgattgtttccttgtgcataattattgctattgcttttgttctgactggttactatatttacgaaaataaacgccgtgacagacttttagctgaggatccttctttgggagagtcaattaagaatgaagagtttatggatctcacagatcgtcaacaacccaaatttcgttatagatggtaatacagtttctctcgcaacaaagaggaagtattgttgtcattttaatatctcgttaatgaatgatccttactctgcctattgcggtcacacgttccccttctcatgtcatgtttgattatctcttatatttctttattgtttcaacgtttgttcttaatttaagatgtgtatattataagttaaataaagtgaaaatgatatttttaatactattcaatttagtataaatacattttggtgttgtaaacaaattacagtctatgtctatgtactattttcattattgcttcgtctggtacagtacttaacgtcttatttgatgaaacaaggggttgaatgcaagtggtacatctgttcactactctttctaataatgtatcaggtgatatagtcgtaaaatgaatctaatcccaaacttcattcaagggcctaaatccatatacaacggctgaagccatccagaacgctttttgcaaatacatctattgaagtcctagttgagacggattttggaacgcagactaagtaaactcaacattatgtcgaacgacaaagatgatcctatccgttgtatactttttagttccttagcaccatattctcaattaaaaatccctacaaaacctgtgatctaaatacaacagctattattaattaaatcgtgctgtatatagcaacaaacatcttgaagcaagatatttttttttccccaaacgttgagtgaccacgatgatgatatctattaaatctaaaaaattttctgtcaccgtataatacggagaaaaactttataaatgtaaatttattacaaaattttacaaaaagagaaaattgaatattctaaaaaagataggattactggcgaaatttagtaacatcaagagcattgaagttgaatcgagtatttcgaggaaaagcaaaaatatctgtaaaaatgagcactacgaccgaaacagtgacatggagtcagtataaacctcaggaaactcaaagacgactttcacgttcaagcactatcactcctagtgtatcagaatatcgatctggtttctcaaaaactgcttttggaaatattgaactggaggaaattcctgataaacaaggcaacattacacgtgctacaagcaatctcgaaagcaattcatatccgaaagcattagatcctgatgcttgtcctcctaaacgatcaattgcacttgtattactcaacaatctcatgtctgaaatgtctttgactattgcgttgccaatttcggctgcatacactgaaattttgggaggtactgatgctttctcaggtcttgttattggtattcctactatgatttcactagtttgcttatatccaatgcttcggtttgcgaatccaaagtctgccaatggatatacgctctactttcgaccactgattgtttcctgcatttctcaaataataggccatttactgtattcactagcgtaccgtgcacaatggctgtatttaattcttatcggtcgtatgtgcagtggtgttggttttaccatgtttctgtatcataaaacttacttgacagataaaaactttgttggacaaaatcgatccacatttttggctactctaaacattttggcccagattttagggtccatggcaggtgcctttctgggtggtatattagcgaaggcttctatgcacttgacagacccaatttggaatcaatatactgcaggatcttggtttatgctatttatctggatcgtatattcaatctttttgtctatcttttttaaagaagttcgggttggcaacactgcaaccaatgttcgaaaacccgaatccttcaccggaaaaacggctccactgtccttcaagcaaaagtttatgttgtgttttctgtctatggctgctttcatttctatctttaatgttgccggttatcaaaccagtgtacctatttacgctaaagcactatatcattacaatccttttcaatctggtaacttcctttctctttcatctttggttattgctccttttgtattttttagcacatttctatccaagtggttagaagataggcagatcatgctctacggattcatgatgggtatagtggccttaatagttcatttagtattggatgctgttcacaaaatccccgtacagccctattttgttttatattccataatgcaatttggatttagcgttggttcggctccgttggtgtctcttgctaccaagcagttgcatccaaaataccatatgattactggtgtcgtagtacaagttggtatttcgattggagaaacagttggctctatttgtggaggtgccatttttgatataactactgttggctttattgctatgaatttgggtattgccttactggtttttattcagctcctctacttatggacctttattaaaaccaagactggttaaaagagttttaacgaaaatttgggaaataaaaaaattcttaattttcatccgttcttttgtggatcgtattatgtatgaaagaatctttattatagttatgcaaaccccttatgaaaggtttgaaaattagaaattaccataactctttaatgtattgtcgttacgatttttaaaatcaccaaaattttactaatttattcgctctcatgtcgtattaacgagagtgaaagcccaacgaacaatgaggatatatgtatacatatataatttctgtatttcagcttggtattaccatctaaaacaaaacttgccgctagctagtttaatatattgaaacggtacattagaatactgggtaaatttagattgtaaaccattgctctaaaacaaaatataaagaatgtttttttgcagtagaaaagttaatgttaagtgatatttaaatcgtatgactctaacccttgtttcttaaagtcgttattacttgaataaaagtggtctgcgaaattggagaattaccacaaatcaatttgtaaaggcttttattttaatagagaaatagaatccatttgacatagtgaaacggtaattttttgcttgttaactttcttgcatttaccgagtctttaatatgtgtatgttctatacttcaacttcatggcctatgtttgctgaaggaaccaatacatggcatataggaaataaaagtatctgaggtgaagcactaaaaatatttggttgtatttactgtaatcaggtcgcaaattttgctttaatcaagcaatcgtttcgttggaagaggaaattttttggacaaaaatgagcatcagtattgaaacaattacgaaacgaaatcaatatagagttgatcagcctcaaaggcagccttctcgcttgagtactgtagctagtatttcagaataccaatccgattactcaaagactgtctttgaagaaattgaactagaggtgatacctaacaaacagaatatctctacacggagttttagaaatgatggaaatgactcagatccgcaaacattggaccccgacgcgtacccacccaagagatctattgcatttgtcctgcttaacagtattctctcagatatgtccatgtcaactgcgttaccaatttcggctgcatacactgaaattttgggaggtactgatgctttttcaggtcttgttattggtattcctactatgatttcactagtttgcttatatccaatgcttcggtttgcgaatccaaagtctgccaatggatatacgctctactttcgaccactgattgtttcctgcatttctcaaataataggccatttactgtattcactagcgtaccgtgcacaatggctgtatttaattcttatcggtcgtatgtgtaatggtgttggttttaccatgtttctgtaccataaaaagtatttgacagataagcacttcgtggggcaaaatcgttctactttccttgcgacgcttaatattctcgcgcaaacagtaggtttcatggccggttcatttttaggtggtttgctggccaaggcatgcatgcacttgacaaacccaatttggaaccagtatactgttgggtcttggtttatgcttttcgcttggtgcatatacggtatcctattgtctatcttttttaaagaaattcgagccgatggcaatgactcgtcagctcgaaagcccgaaaacttcaatggacaagcggttaagcttagctatacgcataaatttatgctagtcttccttagtatggttgcatttatctcatacttcaacatagcagggtatcaagctagcgttcccatttatgctaaagagctttatcattacaatgcctttcaatctggtaactttctttcactttctgctcttgtaatagctccacttgtgtttttgagcacgtttttgtctaaatgggcagaagatagagatatgatgctttatggctttatattgggaatactggctcttgttgtacatcttgttttagacgttcttcacaaggttcgcgtgcagccatactttgttttgtactctgccatgcagtttgggtttagtatcggttccgcaccattaatttcacttgctactaaacaattgcatccgaaatatcatatccttgtcggcattattgttcaaattggtatatctgctgcagatacagttggtgctatctgtggaggcgctatatttgatataaccacagttggatttatcgcattaaatttgggtattgctgtactggtgtttattcaattgttgttcttgtggaatagcatcaagactaagactggctaagtacttttggctgaaatgttgagaataaaaaatttcacaaacatttgtttgtgaacaaaccttagttgaagcaaggaacatacctcgctcaaagctgggaaactgagatgataaaggaaaatattgttatgaggcttgtaaagttcattatcttagatgactctatgattttgtatctcaattaagaaaacttgttaaaaatcatttagatttgtgagaccttaaatcagatatatttgttctacgaggatttggaatgaaatttccggctttgatatacaagactatagaaaatcgttcattctatattttaaatatttagtttttttgggttatctggaattagttatttgaaagaaccgaattgatgagattaattaagttcctatcatttttcaaaagctgcttatgtgaatgaactttaaaaaacgagaaattgaagttttactaaatcggttaattccacaattacaaacagataaaaaagttcaattatacagttagaaactttagcttcttaatagaaatctaagaaatgtatacctttcatgagtaaaaattggttgaagaagtagctccatttgtaaaagcgtaaaattagtaggacttttgtttaaaaaatttaatacaatgtaaacttattgatagataatcagcaattagattattttggtttccttagccttcgctttatgattaatatttgcctacaacaacttgattaattagaaattactgatatttccaattctttatcactctcgctaatgatagcttgtgacgatttagtttttctaaaacggtaatgaagttaaagcataaaaaaagtaacaacaatattcacagccttcacatttgctttagaaggtaattaataaagttaaaatttaatttttcctacaaagagctggactacttcttgaacgcaacattatggctgggctgtctatttcggctcgaagaacttgaccgcagcgcacatcaactacaccttgaggcaattcaaaatatgaagttttctaccgtagggtttttgttttcaacaattttattcaaaagtgcgtttgcaggatggatggatacacacatgaaagatgaacatcacattgataagtacacagatgaatctttttttcgtcttcacgatttaggaaaaaagggatactggtcagatcaagatatacttagtttatatggattatttgaaaatgatgaggtcccattcgtcaaaaagaatgaggttttggttgatgttctaaaaaaatgcgatccatcgggcaatcgccggataacacttgatgaatttcttgcatttcgtaaaaatggaggagagttaacggattttggatttccagggcaccatggtgatgaggaagaggaatttgaaatgcatcatgtggaaaaatatcacccagctggcctcgatgaaccagatgaaaactggaatcatcctgaagatatcgaacattttcaaaaacacgatgagatatttcatggtgataagaaacctgaggaacgacgcaaacattttgtaaaatacaataatatccctgacaagtatcgtcgtgtgagcatttaaattttcccattgatagatttacttgcttctccttgggacgttttatttttatttttatttttccgtttatttttggattgtcgtgttccgatatatatccgtgtttacaaacaatagcttcaacatttttgaacgggtccttccaatactaatgccatatcttatttctttgtcaatacaaaatcacttttgttcgttaaactcattttggtttgcagatattatcatattcttaccaattatacatacactcacaatttgttttacatttccgctcccttcttcaataagctgattgcttataaaaaatcaaacattcatatgattcaagttcaaatattatcatctgaaaactgacaagttccattcattactatattaatatcatttattcgttaaaccgatatcattaaaaatggaaaattaaagaaatcaattcatttgcttccttgaagtctagagtcgatcataacgagagcttcatgttgaagctctttaagtgcagcttgcttagtaatataagtgcgtaatgtttcaacagcctttggtgtttttatgaacttgttaaatatttcttgatctttggaatatacgatattgcatatgcaaactaatccacgatgttgaattccttcatcttggtcggttaacattctgactatgtagttaaaatcgttctggagacttaaaattttcttgcacccttcatcaacactagtaatttgaacaagaattccgcatgctgctaatctcgtgggagtgtcttcggtatctgagagtgctagtacaatgtgtaaacgagtattttcaaaatccgagtccttgtctcctataaacttaattaagcaataaggtgataaagaaaggttgttaataagttccgtggttgccctctgaattaaaggatttgtttctataattagttcatccaattctctccaacattcttgaactatggcttgccgactttcttcatcatgtgaagcaagatttgttagcgcaagtaacacttcaaatttccccaagagaattggatactcagtatcagcagaattagtacttagtaactttgacataggatgaattgctcggttcgatggaaacgccttagtaaatatactatgaggagccacactgataagaattttcgctaatgcaaaagccgcattcgaatcctgggtttggataaaacattgtctagtaaggaatttcaatgcacctatttgtactagcttgcgacgtgccagcttgtaattagccatgtgtacaagtatcattgctaataacccgtttaggctattatagtgcttggccgctgaaaagagttttgacagaatgtcatattctaaaattttttgaatcctccgttcagtaggagcggtttcatcttctttgtaatcaatagtttttgaagcttcagccatgttacgaagttggttcaattctctttcatgctccgattttgtgattttgaacttgcacatattgtatattattgtagcaatagaacttgcatccaacggtgaaatgttcgtatctaaaagcagttttgataaattatttaaaagacaggaatcatcggcaattagttgctttacgggtccgagagtagaggattgtcgtaacgcttctaataaaactgaatcatatactttactctgcaatagaagctttaatgtaggaataacttgagaaagctggtactgaaatgctaacttcattgaaatgagtatagcaactcttgaagtgtgattatctttgataaattcgctacattctttgtgaatgatagcacggcattccttaaagttgcaggcagtatttaagatatttagccattcctcttgaagtccattacgttcagctaattcggtccactcatgacagaactcgggacttataaaatcagggtgactaggtaaacacatcaataaaagagaggacatcctttcaaaagagactggaatagtttccggttggcgagctagaagaacgcagtccttggcaagcacgaaggcaaggttggatggaccatcttggaagataatcgcactaagaagcctgtaattaggattatttaaaaaggcgcgtcgagcatcagtagcagaggtgagagattgaagaagataatttcggttattagcttcttgacaaagacgagcaatctcatttgccgttattgaagaaggagaagagaatagttcatacagtagatatttttgagttttctggggtataatcttttcattgactataagcagctcaatgccaacagttgaaagaaagaaaagttttaatggaaagtccgtcggacatattgaaggctgggatacaaaccgtaaaaacgcgtctcttagctgcttacaccagtcattcagaggtggaagtagtacaagtgagaaaatacgctttgcaatagtttgcaagtttgcgggtaaaatagtatctacacacaaaacgcattcgtgcaagtcttgtaaattacataagtagttccattctgaagcagcagtggactttggacttaaaagcacaatcgcagtgctgattttagatttaagaattagagtaacgatttgcttcttttggtaatcagaaaatacgtttgactccactgaatttttcagaatatcatttaaaaggtcaatttgaggtgttgaggaaagctcgtgggtcatttcacttttgtctatgcaccagaatagaaaaggtttatgataatggaagaaacaattaacgggggcatacaagtaattggtaaaatattaaacgccggtacgtccttagaactaagatggtaggaacaggataaatgcagcagctaagacgtaacccgactctatgtcaaatttgggtagtaactactgtttaacacttacaataatacatattagcctaggacactacaaatgagatttttaattaattaagcaaggtaaaaatggcaagttttatttagctacaaaaacattttaggccttaagagcatacttgcgaagggggaagtagcgctccttcttaatttgcttaagagtcttgcggctttgctcatagggagtaagagcgcgacggatagcacgagtcttcttttgacggagatcaagaggaatgtacttcttgttcttgtaagcctcacgagcggcaagacggttggactcgttgataacagtcaagatacgagcaatgtccttgcgggtagtcttactataaataagttagcaaacattgaacaaggaacatcataatgtttagaagatcaatagaaactaataaaaaccgatgcaaagaattggttggcgacatctaaaaaggtgctacaagctgtttttgacctggaaaaaacttttcactttttccatcggtccagaaagacggaaaaaatatgccaacgcaggttatttcatgtccactgttcttagatgccttctaaatacatttccagtactgcttctcacaaagcaatacctatttcctaagaatttacttacatcttagacaatttagaaccagaaccaccggcaatcttttgtacgcgaagagaggcaagctcttgacggagctcttgtaattgctcagccaagttctcttgcgattgcttacgaagttcaaaggtctttaatgccatctcgtcgtcgtcgttggtcaagagtaaactcagcgacactgttgcttcctactaaagtttccaccaaagaaaagcagtcacactagtgcaagtcaacacgctgcgtaaaacgtctcgtttcaagctcgaaactttcgtgactgttttttatgaatagacaactgaagccagacaaacaacctgccgaacgccgtacgttagaaaaaatcaaacaacagcaacatgggccgcgatatttacaaggacgagacattgacgatccctgagggcgtttcagttgacatcaaggctcgtttggtgactgtaaaaggccctcgtggtgttttgaagcaaaacttgcgccgtgtggatattgagttgaagaagcaaggcaacactatcaagtttattgtctggcatggctctcgtaagcataatgcttgcattcgtaccgcctattccatcatcaataacatgatcattggcgttacccaaggtttccgctacaagatgcgtcttgtctatgctcactttcccatcaacatcaatttgactgagaacggaaccgttgttgagatccgtaactttttgggcgaacgtattactcgtgtcatcaagtgtttgcctggcgttaccgtttccatttcttctgccgtcaaggatgagattataattgaaggtaactccttggagaatgtttctcaatccgctgccaacatcaagcaaatttgcaatgtccgcaacaaggatatccgtaagttcttggatggtatctatgtttctgaacgtggtaacatcgaggagttggaatagatgtatcacatgcaaaatgaatgaaaatggtttgttggcgatttcagacaagctaaaaggtccgaacgctgtggtgaattgtgtaattatagagtaatgcttggatgggtttagcactagcttttttgcaatgacttgtaagtctcattgagaaagtacgtactgcttatagtaaatacttattaagattatcctgtttcctccactagatatgtagtttagcaaacacaggattgtatcaatgcaatacaagataccaacttcttttttagttgccatactctgaataacaattactgctactcatgtagagcttggttgagaagatgtaaacaaattgcaatattcagcccaacgctgctttgcatccacttgaaaacatttttcttaaaatagtttttaatctgtagcatctttattttactttttgtttttctttgattagcccgggcggatgttaggaaaggaataccaaaaattacaataatgtatcgaggatgtatgagtctgcaagttaaaggtgaaactactaagataaaattacaaaaaacattatgtatatagcagttttctttccacgattgatacggtttgtctcataattagccgaatctctaaatgttagatgcaaatgttcgtttcggattctgcaaagtattttgttgtattaggaatactggagttaagaatggaatgttaatgtttatcagattgttggcttgtgcacgaatatgcataaatctgaagcatagccaaaaattggaaagaaagcacagaaagacgttaagttttaaaacggaattcctgcttccttttcataaatgtagtcttgatgttcaagttttccatcatgttttattgtgccaacaacttgaatataaattatagggtgaatttgatatagaacccgaaaaggtaaactttttcagctacgcactttaagatctctgtgaaaattagtgttaaatgctacgtagaagagctattaacatcaacatataaatgccggtaaaatcaatctcctttaaattattaagtagaatccttacgttttttaatttcaataacaatctgaatttagaaattcccgttactgatttgttttctagatgcaattttcttcagcacatgctttataaaaatacaagacgcgattcatcgtcattgcgttgaataatatctggataattcttgaatacagtaaaatacataaactcgtgaaaaggcatttttgtacaatcatttaatgtttacaactcagctattttccaatgaatttcttctgctgagcatttactaattttcatctaacacctccaatgttcgtttttaaaccatgagtgaaaatcgacttggaatttgttcgacatgccaaaaaaatgctagtaaatatcgttgtccaagatgcgattcacgattttgttgtttggaatgtaatttagagcataaacggttaactaaatgctcgggagaaagagaccctgcaacgtttgttcccaaaagcaaacttgttaatcatttgaattcggattttaattttttatcaggtgtcgaaagactaataaatcgaaaagaaaatggaagccatcaagtctcaaatcgtgcagagcgaaatcgattgcaattaaagcgatcgcttgaacgggcaggcattaatatcaagtttgctcccccttccaacaaaaagagaagattaaatagaacacattatgataaaaaaagtcacctcatcaagtggtcaatcgaatggtgcttgcacgaatcaagcacatcgaaggatttaactgacgaagcttctgaaaatacaattatcacacattcacatccagaaagcgaaccgcttgagaaaatatttagaaaattagttgaagaaaattccgaaatgaactcacaggtatccaaagccaacatacacgcacctgatgatatgcagtttatgataaaatctagaaagtcgcgaagcaaaggttttatttataaaaagattgaaccttccaactcacttagttcttgtctacggaactcctttgttttcgaagtgcccactatccatgttttcacgtctactactcaagttcatactgaatcgagttatgaaacttcaagctcggagcaatcagacgattcttcctcttcttcctcttgtatatcggattctgaagagtctagttcagatgacgaattgaatgaattatcaaacgaaaaaaaagctaacagcccaacccaaaacgtggatacatcatcgaagctttcttcagtaaaatttcaaaatgaagacgacgaggatagaagaaagaactccgatggctctgaagcttcctattctttacctcctcttttcggttcttacttccaaaagcagggacaatactgagttatggttgttttgttgtcgatctaatagcattttttaaaaaggaaatatcgggtatttttattaatgtaaatcaaatatggatttgggatatggtatctaggtcatagagcgtccatactggcaaaggattatcgacggacgtttaggtttctaaataatattaatagtaaattctaatttaatttagattacgtatgaatgcttgtatatagccaattttctgttcaaacgtaaaaaccaaatgtgttaaaaaattactaaagtaccagaagttcagttataattataaaatgtgtcctttatttaaaacctatttgctgtacatattaaaaatctgttcgataccttgtttagcatacgttgtaaatttcttggtgtgcttcgtactttttaccaacattaaattggacgtccgaaagatggcaaaaaggcacgcagaagagaatgaagatactgttatgtctgaaagcctgaaagtagtagacacggactttattaatgtaggtaagtattgatgaaactaatggagtattgacatatattaactttttatattagattttgaattctttgaccctcaacccattgactttcatgcctttaagaacttgttaaagcaattattaggttatgaccatacaaatgttaatcttagtgctttggctgatttgatacttagtcagcctttgcttggttcaactgtaaaagttgatggtaacaattctgatccttatgcaatgctttctgttatcaatttgaatacaagaagggtatgaaataatagtttttattttttttgaatttgcaagcccatacaaggtggtgatgcatctgcaatgttttacactcgagtgcaaatttttggaatctttagctaacggtacttattaggatgagccagtgattaagcaattaacctcatacatcatttctcgactagccaaatcgaattcgagactcgagaacgagttacagaaactactggaaccaaattctggctcccaagttggtctcatagtgaatgaacgtctgataaacatgcctgtccaagtaatcccccctatgtataacatgcttttagaggaaatgcaatgggccatcaatgaaaacgaaccctacaactttactcactatttgctgctttcacggacttatactgaaattgaatcaaagttaatggatgatgagcgtccttccaaaaaaggtaaaaagagtaaaaagacatctggtgaggaagttatgtttttccatcccgaggatgaacagtttcgcgaagttgctattgatattgccgattatccctttgcaaaccaggattttaatccggatgccaatcgagtatttcaagatgcaggaatcaagccccagggagagctgttgcttatgacaaatgaggatttcaaaaatttggttcccaagctgatggaaatttacagcgcttgaggctaatatctaaaaaatacatttcggagacaatacaggttaggaattaggttgtggttaagtgaaaatagcaaatttaatagtctttatttgttacaagttaaaacaatcaaactagaagcaatttgtgtgtacagtgactttagacacaggcgttttagatttaatggtgtcgaacatttgcttttttttttaatatagtttaaaggtttcattcagttggcttcatcaaccatattctacagcagaaaaagaggttgtctttttaagctatttccaaataattagcgtaatagataattaaaaaaaattggtaccactccatgatgtgtctgagtaaattttgagttgaccggtagaggcacagttttaaaacgtagttgcttatatactaaaacaattattttctagaaagggcattgcaacaacctctaattttcatgtaaattttgacatattacctagttcgaagaactccattattttcaacttacaaagtgcatatctgtcttcttcttaaagtcgcttctaacgacacttctttggaattatagtatttctatggatgcacaggatgaagataatccatttacgaatcttgaaactactgtagacgtcacagaagaaattcaagattggagatttttatcaaatgtcgaaaagtaagtatttcgaccattcagcctcttactcgttgtataatttttctagaaatgtactaatttcattaaaataacagagaccaagggacatacactatcccaaaacgtggacaaaaagactttgaaccagatggcaccaataagcaacattctgctctcgacttgagcaggaaggcgatgtttgatgccctttcagtggagagattaatatcggcgtaagtttgagaatgaccgcaatttcagttacgttaaaaatgtcataagctaacgtggatggcatttagcaaacatgcaataatagctacttggaatgcccaaaatgggatgtcttgtgttgaaaaggcacatggacctttgtttaaaaccatgggtactgctgactctcaaaatcgcatgtggttacttccagaggagactttgtatcttgttgaacgtggatcgatggaatgctggtcagaagaaggattgccaatgagtttgcaagcagtttactcagcctctattcctttatgtggtagcttagaaaattatcttgtttatgctcatttacggagatgtggtttttcggttatacgttcaaacctagttccagtaaaagaagatgaatatcgatgcgattcgaaaattatgaatttcaaggatttattgtttttaggattgggaaaggcttcacaaatattacaaacatttaactttcggaaactagcttttccattttcaaagcggaggaggcagtctatcctcttacatgatacattttatacatacgaagaagtgtatcatgatttgcaaattgtccgcggttatgttccaatcgcttgtaatcttataacatcttcagattcattatttcaaatcacatttcacgcatacaaaccttcagcttcattcaaaaaatcggccttatcagagcctgattttaggatatgtgtggttagctctcaggatacattattacctactatttttgagattgatgcgcttttttcaagtactcctcttcgacaaaacatgccacagcatatgtttcaaagactaaaggaagggtacagaaacattattattgcaattgtagattatggagttataagctacattcggctatcggatgtttgttttgaagaaaaagtttatacagacttctctaaaaagggatctaaaaggaaaagggtgagtaaaaaatttcaacaattggtctaaaataatatgttctcgcggaaaaaaggagagaaaaaaaagttcggtgacatatcttgaatttactattagctaatctttgatgtcttggtcgtggttcactagtctttgaatctaaccatttctgggattggaatattatcgttgaagcgtaaaacagtttcttagtgaagtataaaagctcaataagtgacataacttaagtggggattttttcttagtctataatacgttatttattgttttttaataagttgatgtcgattcctaattcattactagacattactacaagtaaagttgaaggcttagcttttaaacaaatccacatatagtctttacagattgatatttttgcctacaagttctataaagcaattcttttccgccatcagtaggttttttttaagacgatcatattctgcaccattggcatttgaagcagtcaaaaccataatgaaataaaaatcaaatttctttttttgattcattaaattggaagaacttaaacgctgcaaatcctagtttctccattataacgcaactggccaattcaaactttgtcatatcctcttgcagccgatttaggcggatccctaagatacccactcccaactcccacctctgttgcaagcagcgtaatttagtaaacaccgattaaaaactttttcgaaaagtcctaaataggtaatatgaagtcgtttacaagaaatttaagaagatttcagaccccgagacgaaatttgcatggaatctcttatacaccaaaaaaagtggaaggagtttcgtttgccgggcgcgagacacctactgcgacaggttctttatccgttgtgattaacgccggaagccgttatcaaccagatgctggtgtttcgcaccttttggagaagtttgcatttaaaactacggaagagcgttctgctttacggattactcgagaatctgaacttttaggaggacagttatcaactcaaatcactcgtgagcacatcatattaacagctcgttttttgaatgaatatctcgaatattatgccagattgttggctgaagtcgttgatgccaccaaattccttcctttccagttaacagaagaagttttaccgaccgctcgcattgagtctgaactgtttagggaagacatccttagggtcgccatggccaagcttcacgaaaaggctttccaccgtggcattggaaacgaagtttaccttcctgcttctgccagcccttctatctctgaaataaaagattttgcttcaaaggcttatgttaagtctaacttttccgttatttcctctggtcccgacgttcagaaggcttctgacctgtgtgctaagtattttgccgtaattcccgatggcagtcctttgaagtcagcacccacaaagatttcttctggggaatcacgtgtttattccaaaggaaccaattatttctgtttaggatttccagctcccgctgcttctcctgagctttttgtgttgtcttctatacttggaggagatgctgccgtgaaatggtctcatggaaacactctccttgctaaggctgctggaactgcttctgaatacaaagccacagctgttgctgatctcactccttattcggatgccagtttgctatcggtcgttatttctggcagttgtccaaaagctattaaagctactgcctctgaatctttcaaggcccttaaatcattatcttctaatatccccaatgatgttgttaaaagtggcattgcaatggctaagactaagtacttgtctgcttttgaacctgttactttgaacgccatatctgcttcatctttagtttctgcttcaaaaggatctgatgcctttattagtggtttcgacaaggttacccccgcatccatctctaaggtggtttcatctttattagccaaacctgctagtacagttgctgtgggtaaccttgacgtgctcccttactacgatgagctttaggatacttctctacaaatctttttttttatcgaaaatctttctttgaaaactttttatacaccataagcttaggatgatgttttgaattattttttttcgtaacatacttcattactcaaattcacagtcctgacggatcgtcttatgctctcctttaggcaacaatgattaatgttattttccaatgaattaataccaataaataatttggtagtattattatgtatgatgacgatgtactaatttgtaaagaaattaaaaaatatatatttatatatgcaatgcaacattaaaataatagtttctctcttgagatttcataaacaataatgataactatcgccatcaagagcggttaacttatattaacttcagatttctcataaaacggattttcgaagacagtatgttatcgtctttatgcaaacatcattttttaaaaattaaatatgcaagcccatggcatcttatcttaaaaattttacctcacaaatcacctaatttgaatgctttgctttcggtatgctttttaattcaacaatcacaaagattcaagattattcaacatcaggtaaacaagagttataagtagctgggttgaactcttgaacgtttcactcccaataattatatacatttccaatataataatacacgtgaataaatagtaaaaaaatataagcgattaattttcgtcgagtacttttctgccagaatcgctaattaggaaatccagaaaaaggatactctctgtcatactctgccgataggccgaccgcgctagcaagtttcttcttcatcccaatagtttcgtttacatgaaaagttaccccatagccctgtaaatatcgagaacattgactcctagacaaccgatctacatcttgaactgaagtaattggaggcaaatcagggtccggattattaccattaataaagggaacaggcgaaatcacgtatgcacccttcctaagatctctattttccgcacgaactgaacgcatatcgagagtattgaccttatttgtgaaattaatcatattttcttgcatggtgttcatggtcccttgcatagtgttcatggtcccttgcatagtatttatggttctttgtaaatctgccataccgctcattaaaaagttgagagtcctattctgctcctcgcggtctctttggtaccaaagtggcggttgaacttggctttctctctcaatttccaacgcggtccactcatccactcgacgttgaaacctttttacgcgctcatttgtacgaatctcctcttcattcaggtgagttttgttctcaagggcccttccctcactctctaatattctatttctcgcttctattcttcttttctcgaattcaactcgaaagtcgtttaaaaatctatttccctcctttgaagaggattcagttggtggaggaatattaaattcattagaaaattcctcgttcaattcactttcagtattaggcataatttattgtttacaaattaatattgtttagtagtaacgcgaatagcaagctgggtgcagccaagtgtagtggtacatgaatatgtaaacaccaaagctgtaaacaaaaaagcttccggtagttgttcatcatttttttaaattgaaaaggtgagttgatgattaaattatggtttttgttaacggcatgttttcaagttaactaattacgtttgcttgaagagttaattcaacattccataaaaaatctccatttctgttaacattaagagtttcgggtctaagctaaacttaaatttatctatgtttgatattttaatttaatttgtaacacatttttcatcctttaaccgtgaaagctcatttgtttgttactatgttttgcttttgagttatcaaaccagtcagttgatcattaaagaaacatattagatattattaaaattttcttgctgtaaacgtcaattcaataatcagcttgactttaccttcactgagattaaggtttaattttccattatcctttagaatcattgcaaaatttttggccttcttcagttcttaaatatttctcggatcgatcgctgtctttaattttcttgccagttcacccacgaaaaggaattcgattaaatattcatactagctgagcattatttcttttataccttctctgtatcctagtcgtctaataaagaaaatttttcttagcgcgaatctccattgactgatcatctttacatataccttttcgtatttaaacctcaattcaggttaaaagtcgattttctataatacgaaactctccgaatttattaccattgtcattccccaaactgtacatattgacgtcccctccaacacaacatacggttagctttgaagcatcctcactgaaccctccgtaagttatggctgaattcatttccgtaaaattttgtatgaatggattgttcaatctcaaatcccaaacctttacaatgccatcactgcctccggtaacgaacaaattccccttaggctgccattgtgccatatttatacctgcatcgacttcctcttcattagccccgtcaaaatgtatcattttggtttttccatgcttaagcaagctaagaggtttatctggtttacgcgaatcccaaacaaacgtctggttatctgtaccactagaagttaccaagattccagagttacttatggtggcatggttaatgtctttttgcgttgtcgtaaagttgagacaaaccttatacattcttgtgtctaaataatatactcttccattgctcaaagtattgctacttgcgacaaatccaacttgagaaggatgcatatataaggaggtaaatgcttcgtcagcggtgttgaatttttgaacgaagctggcagtggaagcatcaaacagagccaaacatcctctgttattagaagtatgaaaactatcatatccaataatgactttgtcagatgaccttcccaaaaaattggaaaattcaatcaaagatgcagagtaccctttttctagagcttctggataaattaaattagctgatgtgagaatttctcctgttgagttgtcagtgctcaataaatacccataaccatttttgcaagctactgcaagtaaatcgtcatcagatagagcaagcttgtgaatatagtctgtgggtgcattaaaaatcccacataaatttccttccatatcccagactttcacagcattgtcgaatgcacctgtataaagaaacagattacccttggaaaaacacaaatctgatatcgtagagtattccttttctcctacttgattaagtttataatggctttccaatgactgaatagtttctgagtgaaaatcaccaatccataagttgcctagtctattgtaagcaccatcttgtgctgtgctgcctaaggcaaatttttcgcacaatggattatatgcaacgcacactgtatccccactagtttcattgaaatgtttccaaggttttaaaaagaaaactgattccccgtccataagttgatgaacttgttctctttggaagtaagatgagcctgcattgtaaaaggattttaagtaatctggaagtaattttttattcttcttgtatgttcgtaaaatgatggccccatgtttgtccacaggagacaagctggggttatcaatttcaaatttctggcaatcttcatatgctcgtccaggaagttttggagaaatgtgggtcgaataagcatcattgaactgaacactgtttaccggtccaaattttagtttagcttcttgtaaaataaagcattcctctggtgtaaaatcaacatgaatgagtgatggtttatcatcgcctgtaatgctatttgaaagtaaatgagtgtgttttctcactctttcactcaaataaggacgtgaattaggtaagaatgtcccagacgttagtaaaagttgcaattctaatcgtttatttacatttgatggaacttttgcaattgaatgcttcgatattgataatgacggtttcgggcaaggtagctctgcgcgataaaaaggatcataaatctcaaattcttcctcaaaaaattcttcgttatttgtgtcaaagtcaaccttgggcaatttagaagagacggaatgcaaatattgcgtatccgttcttcttttcacccgtggtgaactattagtcatgccataaataggaaattgtttgagaaattattgggctttttacttttaatccttcagtgtgcaagttcactagtttaacagaagttatgggttgctgagtgagtttaaggcactgattgatataaagaatttactaagtccaaaaagtataaagacattccaaaatcgaaaatattatattaaaattgaagatataatgattatctattgagttactattattacaaatttatcagtcaaaggtaagttaatgactttacattgaagcgataaaatcttaactatgtttaatttgttttaaaaaactttaaccgttctattgacaactcaataataaattatatccattaataggaatccccaaaaaaataaataaacttccaaaacgcatatactgacttagggaattacggtccaaaaaactaggataacaaaaaaaatgcaaagggagatatggcaggtatataaaaaggaaacggccaaaatttgggctaattttaaaaaaacaaaattctaatttgagaacaagaattgcatatcctcgacagaaagctggttcaaagccttttcgtcttgatctatggttgcatgtatcatctgagctttcttttcttgtagttcaataattttgctttcaatggaattttcaatacacagggtaattacttttatcggccttttttgtccaatacgatgaattcgatccattgcctgccactgtacagctccattccaccaaggatccatcataaacacttgagatgcctctgtaaggttcaaagcaacaccacctgctttcaacgaaactagaaaaatggtaatattaatatcgttactgaaagcctcaatagtagctgctctcgctttgggggtcataccaccatctagctttacacaattaaacccggcttttcgaagtcgccaatgaatgagatctaacatagaagtaaattgagagaaaacaatcgacttcagtgttcggtccttcttacgaagtaagtaaagctcctcaactaatgcttcaatttttgtagatgaacgccaactattcatatcaattctattcaaaatcgatgcattcttaaacttctcttcagaaaaatcttctaaagcaggggcactaagatctatgcttaagggaatgaaacaacttggacagttgacattttctccatcaccagctgcattgatatattccgtaacgcagagtcgacaaaatgtgtgatggcaacgtgattctatagcatcttgagcgacttcgtcacaaatcttacagacgatattttcctgattttcaatatcaactgtttttcgtttgctagctaacaccaggtcaggatgatctgccatttggcgcattcgtgtaattagctggaaaatgtttgcataattattcaaaacgacaccttcagcaagatatgtattaaattttctttttgaatccatatataaagattggtatacatcttcctcttcttcgttgaataaatctttcctcacttcaacgactcgaggaggtaatccaaggtcatcagccctctctaattttgttcgacgtaacataatgtgttttaataaagaatgcacctttttaaaagctagctttcctggaccttcgtatccaaacttttgtattggttttagcatttcagcgttaaaatagcaagtatgactcattggtttatggccgcattcgtcgcaattacttctatcggaaaatctccagtgcagagatttacattcacattgcaagcaatagtagtaagcaaaaggatctgcccgtaggaaccgaagaagtgaaaataattctccaatacggttttgcaaaggtgttcctgaaagacatatctttcttgtcgttcttaagccacaaacagctctggcagtgttacaagtccttgatttgataccatgggcctcatcaagtataattcggtaaaactccatttgatgaagtaatgacttttcttttacaacaccgtttttccttctgaatccgctgcgttccttcctgtaaactgattcaattacattgtaactcgttagtacaacatcatagctcgaaagctcttctcctgaaatatcacgagcctggccataataaagatatgtactcagtgctttattggtatgtgtatcaatctcttctttccattgcataattgctacaaccggagcaacaaccaaggttggcttacctcgaggttctgaaagcaacaacgcaattgtttgaatagtcttacccatacccatttcatcggccaagattcctccaccaaaagaggaatcttcttgtcgttttaaccaatatacaccttctcgttgaaaagggagaaggtttaggaccaactctttgggttgctcgatctgtttcacttcacgaggtgcttcttcttccaatttctcccaaacatgttctagttcaggatgttgtcgaatcagacgataatgggttctttcatgtgatggaattgattttgcttgtgttctagaggaagaggacgcggaagaagaagccctagcggataccctccttcgtttggactggtaacttaaagggattgactcttcatcactttccgtagaagaacttggagcagcttctggaatttctactttactatcaaaagtttcatcctctttgatatcaattatgctagcaacttcatcactttcatcatcatcaataaattcggattcattagattcttctggagatgacaatggcacaaacttttttttcaaattcgaggaccttaatgaacgttttctggcactagaaaaacctgtattgggatttgcttctacattgtctgtgctgctaccggtgtgtgtactggtatcagaaatggataatgggggtgtcgaatgttgagatgaggtgttgtttgactggataatcaattttttgtttgttgacagaggttcttcaaactcttttccgttccagcgcgttgtctccatatctaacttgtcgtcacgctcgacttgttgatttgaagcattcccctttgaatcaccattatcatctagaacaaaatgcatattttcttttcccttattactattcgagtttattttattacatgacgtccccatttgtgaatgtaaattgttttcaaccacttcctcatcttcactttctacaataatgcccgcaatgggagaagatgaccattcatcttgattgcctggtacatcatgaatgttatttatctctgaataagtagtagaaaatggagcctgcccattactttgctcatcattattgtctgcttgaagagacgcctgagtagtatggttattgcgagtatttttccaatttatggaatcaattgtatcgtttgaattaatatctacagcttcattttgtaattggtccacttttagagtagatatatgcatagtagtggttggtatgagacaagttgccacgcgatctgaagcgatttaattaaactcaaccacacttccaccttatcctcagcatactaaggatttctttaaaatgtcaagtggaagtcgggtgagagggccaaattctgctttaacagaatttttaagagtatgtgatgactctttcttagctcggagttactaatgcattattcagtctcaaggtatcaatgcttcagcattaggacgtgctcgtcctcctcgtcaaagcgaggagtcagcagggcaatcgactgggacagaatcagaagttattcaaacaccgacttctgttgaagaaaacaacgaagatgaaaactcgatgtcgacaacgacaattgagataccagtagtgaaacgacgaaatctacgaaatcaaaaaaagaagaagaaaacggatgaagaagctgaagacaacgaggacactttttcaatgaattcaagagctgggttttcttataaagcaagggagcatacgggcaaactagatttttgcgcacactgtaattgtcgctttacaataaccccatacagcaaatacagcaattcagagaaagggtggctatgttatccttgtagtcgtggtgctgaagatcgatcggtacctgaattaaggacgagaaaaagaaaagcattgacccgtaaaaaggtggctgccgctaccatggacgaagaaatcagtgttcctaagcttcaggatttgtgtatacgagttattgctgaatacataaatgatatcgaagcttttggggatattggccaagtgaatatggacaaaattagccaaataatttcaaaaaaccgctctcttaacgatactactgtgaaattattcttaagtgggggtcaaactgaattaaaactatatgattgctcaaagattacagcagattcacttttccaaattgctcaatactgcccaaatcttcaaactttgcatcttacttattgtggtcaaatgcaggatcaagttttacacttttatgcggatcatttgactgaattaacagatgtatcttttcaaggtgcctttttggtttcttcctcagaatggataaatttttttaaaaaacggggttcaaagcttataagtttagagcttacggatactgcccgaattcatgtttcggttatcaacgctatagttgactgttgcccaaatttgattagccttaatctctctagaattttctatcttgatgatgaatgcgtccgtctattagctggttgtagaaatcttgtcagtttgaagattgaatcaccaggcggcatcattaatgatggaagtatattagatgtactaaaccaaattggaagcggtttgcatactcttagtttatctggttgtacaaaattaactgatgaagttttgaaacaaggtataggtccttgttgtggtcgtcttaagcatctaaatttaagtggtttggaactgttaacagatgatgaggcctctatagtttttggtgaatggaagattcagtcaggcttagaaacattgtccttaagaaggtgtctgtcacttggagataaaactgttcgtgcagtattggttaattcagggcatacgcttcgcactctggatttaaatggaatgtcgtttgtgactgatgaagcattacagtatattgtcaattttccattacctatgctaaaagcacttgatgtcagctggattcgtggaatgaatgacaaattggtatgcgattttgaaagcaaaaagccaacgcttgagaagcttttggtatggggagataatcatgtcctgatgccctcaaatcggttacttctgatagggcgtgaagttcaataaggatggaaatactttctttttcaattttatcaaaggttttggttgttgaattggacctgtaattattcttttgaaaaatttaatgactagtacattatttaaattatcaccttatttgatggacactaagttccttgaacagcctcaatctctttttgtgtctttctgatattattctttaacgaatatttgtatttgaaacctttttatttttaattttatttatttatttattttcaaattagatgatatggtctgcgaacaaatagctaaccatttctttgggtaatgaattatttttttattaccattccctctctttacgaatggatctccgaatcatttttacacataatcaaacaatttaactacctttttttaaaaaaaaaatcccgctgctctttgttgtaatacaaatatcaagcaatgtaattttcaatcaccttgattttatatagcataagattatgaatagtacactaatggtattgcttgccagactaaagaggtttactgctgctcggaaacgcaaagctcatcaaacaaacataaatatttatcctttttaaactgcaaacattcttttcaaactgtaatattccaatcgcccgacaagttgggcatatgaaaaatcaaacaattgaaaacactggttatgcaagtcgatttggctatctcacaatccgccagaaaagtatgcaaaaaatatatacaagggcaaaaaaaagcaaaaagcaagacaagcggtatgagattaataataatattgagttgtaaaccgaaaatattgattctaatgcttaataattcgagtttacgactacggtcatgagcctcactataaagaagaattacttagtgagccgttgatttattataaaagaatgattaaacgtaccttttgttcaagactaccattctccattaaagatatgcgattatcttcctcttgattaatatacatcttgaaagaggctatcttcaaacctgtgaaatatcaatttatatagagcaaatggtcagagaatgaatgggctttcttccagaaaacgagttcacttaagccaggcaggccctagtccttatatactatctattttgcagagctaaagggacgattgttaaagcggagataatgtcagcaatactggactactctatgatacaccatgttgcgtatttctatatgtcacaagctctacattgtattatagatacccgttgataaaaactattagtaagattgtaaatggagcttctactgaacctcgtttcacagttcagttatgagctatatcggtgaccgatactaacagacttcttataacaataaatataatattgttagttaacataccgcataccgctacattgtagatcgcaagtaaaaactcaccgcagttctatatatcgttaaaacagatatcaaactgcgtagctaacagataacatacatttatttactcacatatattctggttaattatcagtttacatattaaagaaatggggacagcagaactacaactttgcagtctcaacttacaaacgatataaaacatccttcatcattgtatagtacaacatacatacaaatgaatattcgacaatgtgttataaccaactcatagttaaaaacaactttagttatgttgaacttccttggctgtgttgaataaagaattcgcagttgcgacttttatgtaaacaagtcattaaactcagtttcagaagcaattgaagggcttgttatatatattatgtgacataaaggttttttgaatccggtagaatgaatagattgaataaatacagtgaacatttgaacaagtgatttagatctatttatgtttaaagtgcttcgctgatcaataagatgagcgacaagcgaaaaaatgagatatgctgaattacttcagattttgttttctttggttatcaaaattccaagcttactcgctcgaatttctcaactattaatctatgtgtctcatcatcgttcattccattaaaaccaattgaaaatacggctacaacagtaaaacaatacgattgttaaaattaaaagaaccctagtcaatgcttaatgcgatcattgttttacggaattttttaaacaaatcaaagctttataccaaatacactacaagtttataactgatcatacacaatactctcttgtaagcacacaaagcgggataaaaagttaagtagatttaaatatttaaacatgaactctttgaaactaaaacatagcaaagctctgcgcccgaataataaaaatatcagtcataaaaaatatgcgaaaaaatttttagacatgggtgtaagcagaacacgagcaaaaccatatgtttctcgccaggatcacaacccacaaagatacatattgttccactttgctatgttttcaaagggtatagggaatttcgttggcaattgacttcttgtttacaccaagtaaccaacaaaagaggtctttaacaactcttcttcattaacccaatcatgatgtttaactatatagttgttaacaaaactgcaaataaagaaaggtttgtaaataagacttacggtacggttttgtcgcatccacgccagagtgcttcaaaatcttcttcggaccaactggatggtatgggagatacgcagtaacattatacacctttcctcttattgccatccaacaatcatcggggctacagtgcttagcaagttcttcagcagtaacggaaatgggactttccacaccctaaagcatcggtgttagtaacacaatagaacaacaataaaatttcgaccaaatcaatctcatttcaatacaattagcattgaaatttcttagagtaggcaaaacattatccatgcgcagaaatttaactttttcataccgataaattttttccactggctactaaagcatcccaatcttgttgagtatgtccaggaggaatcttatacttattttttctcttctttctcttacgttcttctttcaacccttttgtatccttagaattcgcttcctgagtagttccatcctcttcagaagttccgagtaaatttttgaaaatcgacaacattgagtgttttaaagagggaaaagataaattcgtagttgcttgatattttcacacttataagttgataatggatactttaatagtatataccaatatatatataacgtttagtaaatctagatgttatctgatcgtgaaaatgataacaagttacaagccacaaacgtttactttgttctttaaacatcgctagttgtagtataatttcggacaaactggtgaaatcacttactgtggcactctgtttgtcgctattaacaatttttctatttcatgctttttatatctcataaaaatgtatttggcaggttctagtaatgcgcattcaatttgtagtattcttaaataatcattaaacgacaagggccttccgtgctatagtgttatgctttgccgtaatttaaaaatgttcaatttaactacattaccagttgcgaagtaaacatctatattaggtgctcaactaaaactcatgattaaatacctgcactgtttgaagcgtctttataggaagtttatctactatttgacctataagcactctcttcatacaaacagagaatatctccacttggttctgaagtaaatttagatttcacatttaaattatccacgcaagttggtttcattatactcaagtgtgttaaacgtgaatcagggttatatgtatggctatgttcttagcttcagcatcaataaaatccctggatattgctgctgataatatcaatttagaattgtctaacaaaagtacaattattgatttaaactctcacctttgaacaatcaagtagacttggtaaaaaggtactgacaagtgctacctatcataatggaaaagatatactaattagtgtaaaacaattaaaggttatcaagcgttgttcatataattgatcgtggcctgtctgttgaatcagtttataactgaactgaggaacgaagttcagcttggacttctttataatctattataatatcaatatcaagggatgtttttgtaaatagagggatagttattatatatacgttcttatcattccttagatggtgcgacactgacaattcctaattgaccacatgttattaaaattaattcttaattttaaaaaagactacaaggagggttcaatataacttgacattctccatttagttgcaaactgtttttcaaacattatactatataggttttgtaaatgcgcgagtgataatataatgtatttgtgttcttaacaaccaacctctttaagacgataaagcggtggatggccagagtcttaaaatatcgcaatcatacgcgtcattataagcagttaacaactgggtgttggacttttttaaatttttcgccatcatttcctttttaagctttaaaggaaatgtaagccatagttaagcgagaaatcagagttcaagattcttattgatgtgcttccaaatttggcttatttattgtggtaaatcggatatgtttatctgaattcaaataaaagaataaagcttaaaaataatgtcattaagaaactaactatgaacaaataatatcgtgaagctagttgtttctaagtataaacgattgtgtaaatctcttatcgcataaaaataatagtcatttgaaaatgaaccatcagtttttgtctttataaagcttttgaatgataactatataagatgcaagtaaaaaattaaacgaaaacattacacttaattgttagaatgttttcccgatcactcaatcaagtctgtcttcaaggagaaattaaaaataattatggaccgacttatgagtaaaactctgtttattcgctagaggaaaatgggctgaaagtgtagctttcgtcgtaagccgccgtcaaccctacggccttggcaagttgtcttttccaaagagattgatcgttttcgtcataggaaactccgtatccctttagatatcgagtacagttctcttctgacaaagaatcaatgtcttcgatacgagtaattcgaggcaaattagggtcaggaatatcgccattaaaaaagggaacctcagtaataggttgagcaaaacttctcataatcatgttgttatttcgagagagcctcatgtccatacgatcaacctttctcgtcaagtttgacaaatcgtttcgcatgtctcgttgaacatcaaggatttctcgaactatattaagaagattttctaggcgttcatccgtcgactttctccactcatccgtcgactttctccactcatccatcgattttctccactcatccatcgactttctccactcatccatcgattttctccactcatccatcgagttcctccactctttatcctcttctctggctttcttccattctgctttatcctcttctctggctttcttccactctgctttatcctcttctctggctttcttccactctgctttatcctcttctctggctttcttccactctgctttatcctcttctctggctttcttccactctgctttatcctcttctctggctttcttccactctcccatttcccttcgaaaccaagctggaggctcatccagactatctaatgtcctttcagatcggccccattcatttacaataccgcgaaatagtttacaacggtcattgtaacactcgtcgttatcaaaagcccttttcttggaattgaataacgttctttcagattcaacaacaaaattcaaatttttctctttgtcttccaatgctttcctttctagctcaagcaactttttttttgccgcaatttcaaagtcgttcaaaaatctccttccctcctttaacgaccgttcgcagggaggttgaacgcccaagtcattcgcaaatagttcatttaacctattgtcttcttcagacatagttaataatattttctgctttataacgtcaaaacgtggtagtacgacaaggtacagtttagcaatggtaattgtcaattaagttgatgtacacagagcgtcagcattgagcaatgtaaacaagccaaccccatatacgagaaataattcgcgttagcaaacactacactaccttatgtgactcactgactattcacatttgctgagcatatctcatccatctgatcatgaatggattaaatctaaaaaaaaattaattgctcaagctttgaatgtaaaaactttgttctcgtcttaaaacttcaatcaaaaacggtagcaaaaacattaacttaaatgctttggccgggaatcgaacccgggtcgaatcgatggcaacgattcattataccactaaaccaccaaagccgatttattccttcataatttttgtaccatataactcttcaaaaaaaatttactccagtgtacttaaattttgttattccaatatgagatttattttgagaaatacgggctaacagtggaaattttcatttatctaaaaaaatttttacaatctcggttttttattttgcccttctctataccagcgatagataattccagttagtttcaggtttcccttaagtatgttaagatggcttgtctgttcatactgatacatttttacaaataaaatcaccataatcttgccgctgtcattaggaatttcacttacaaaagacgaatatgttataataagaagttgccagatatcaaattaccccaatcaccattactctgcaaactaagatagtgtccaatattagtcagcacagtatattttaccatccttttcctattaccttttataactaatattcatttttgcttatcgatcactgaatatttctcttctcgacagttataaatattaattcacatgtttactaaatagaggattataatggaaatgcatcttatcactattttttttatcgaaactgtttggttttttggttgtaagctacgcagtttggtatctgatttaaggatacgtagaactgcggtgagttttccttgtgatctattatattacaatacacgggttgtataagtagcaactgagtataggtattgtattaactgggttataatgttacctatcactaatatagctcataactgaactgaggaacgaggttcagcagtagctctatttatagtattcagataatatagatcttaatagattatcattaagattaatctccatatcgtatcatacatggtacgatatataattagaacatgtgacatatagtgatacacaacgtagtgtatcatagcgtagtgtagtattgctgacattggtaaacactgtaagttcgtacccttttgtttggtatatagtataacgtattagtgtgtactttgaaagtctagctttacagcttggcattgttcatacaaacgtcttcagcatatctttccacacttgctctgtacacgtattctttccctcttatcattcctgtttttcttttttaataaaccaacatgcctgtaagtagttttatctttagaaatctgtgcatcatggatcctaactatgtcttttagacggttcaaactccctctcagcgtcgtgcaaacacacagtttcagaagaacattactcgtcgtgtaaaaacaaattcaaaagaacgttatgttgccaaacatcctcctaccaagattcctcgtaacattgccagtaagtaagaattgatcctattgttagcaactttggcttgtgtttcatactgacaatgcatcttagtgttttttattcttctcatgtcaggaggaattattttgggaatacttagatttcttttgacgtttttttcttaagaacatgtgattggagcaattttaaaacctatttgcaccgatattgtgtattatactccgagaaaaagtatactagttttgaataataaagcttgtgatattgacgaaactttttgacatctaatttattctgttccaacaccaatgtttataaccaagttttatcttgtttgtctacatggtattttacattcatctacatacatctttcattggctttgtacatagttatcattacaagtctaaaaaaattcactcttttcttattcaatgtcaatccaagagaaaagattgtggtaatgttgtaggagcatgtttaataaattactatagcaaattactttttattcccaaggtgtttatctataatagttaatattttagtcgctacataaaattttaccaaagagtacttgtatactaattctaaatgccttctgacataaaacgcctaggaaaacaaacgcaaacaaggcatcgactttttcaataaccaaccaaaaaaattttacattagtctttttttaatgctgagaaagtctttgctgatatgccttccaaccagcttctctatatctcttggcttcgacaacaggattacgaccagctccatagactccacgaccaacaatgatgatatcgctaccgcagtttacaatcacttcttcaggagtacgatattgctgtcccagcccgtctcctttaacatccaagccgataccaggggacatagttatgtagtcgctttgaaggttaggaaatcgacgaccagctataaagccaaagcaaaaatcggtatgcttctcaaaccattctaaggttttctctgtgtaggaaccagtagccaaagagcctttggaagacatttcagccaaaagcaagagaccacgtcccaaaggtaaaccaacttctttgaggccttgtataataccctcgcctggcactgtatggcaatttgtgatatgagcccaagaagcaattttgtacacaccagatgcatattgtagcttgacggtatttccaatgtctgcgaatttgcgatcctcaaagataagaaaacgatgctttttacctaaggccaccagtttttctaccatatcctggtcgaaatcctcgacaacgtcaatatgtgtcttgataacacagacatagggtccaattttatctaccaattctaagatttcggatttcttcgtcaaatcgaccgcgactgacaagttgctttgcttttcttccatcaaagccaacaattccttggcaatgggatttttcatcccctcagctctagctgaatagctttgaaatactctagcatccataactttgcttttaaacctttaatttcgatccaagcaaaaaagaggttcttggtaggacaatacggtaagaaaacacgacatgtgcagagatgccgacgaagcatagttaaactgggatggtaaaatcaattaagaatttataaagacaaaattgtataagtctctaaaacatcttaattatacctcacagaactatctaaaatatattcacaaagtgcaaacattatcatgaaaaagaaccattttaatttaaagcaagggcattaaggcttatttacagaatttcttacttttgtaaagattataaggctgattatctttttcaccatgccaaaaattacacaagatagaatggatgtttgaaattaaacgtgagtatacaaacaaatacactaggtaaatcgaaacatttttttctccattaagtaacaaattcctatttagagaaagaatgctgagtagattaaataatctatacaaacttttttaacacaaatgcatacatatagccagtgggatttgtagctaagcttcaggagttttatccatttaatgtatggaatcaaaatttaaagcttctgtcaaagtttaacaatatttcttttggtttaaatcaaatcttccatgcgattaagaagatagatgctgaacaaaagaagcacatggataaccacaaaagcagtttgctcatgggtacaaccatgaatttttttttcgacaatgattcaaagaccagtatatccaatacgcatcctagaatctagtcaaagaagaacctaaagtagagatgcaaatgcgctaaaaagagtggatataaattcaatatcatttataaaacaacttcttccattaaaaattccttgggcaaaacaaaagttccaatcataaaaagttaataagttctgagttgtgtcaaatctgacatggcattcctcaataatgacactcactcattatgtaagcatcgaaaacatattaaaatctatacaagctgttttgtcattacggtctggcatcaacttttttagaggcggtacgaagatgattttgcacacggataaccaattcttcatgagatccgctagttttaagtgaattttttttacaatactcaattaactgtttttttgaccattgactaggaggactttgagaaatggaggatgaagctgtctccctggaattgtctgtgataggactaactacaaccgccagggaagaagcagcaataattgcagcaaacgataaagttaagacattagctattttcatcgaagatgaaatacaaatgagtaaaaagaacccaaaaatgaaaactgttattaaaaaggagattttgaaaatttaaaggttgaggtaaagaacggttgtagaagacgagcatctagaggaagacgcccccaactgtggccaacgtttttcattacccaaattcatctgacattgattatgatacattgaaggtgtgcttacatctttctagtcattattttgataccaccacttagaatatccatttcaacttctaccgattttcaatcgtgttacgaaaacttattgtaatcgattcaacgttttacttgacattaattttttaagcatatctactttcttataaagaattgtactagtactcaaacaatgagttgttaagataattgtgtataaaatttcataaatctaaacatatatcatcacaatgacaaaaaaaactcaaatatggagtgctttatctccatcatttcaaacgcccttaaataaggagcttatctttttgattctaagtttcgttcattaaaggaaaaaaacattcccatcaaaacaattagtacaacagttcatcagatttaaagagagctaaggaccttgtcagcggaggaaatatcaacatcggtgacctcgttctcaatgaaaaccttgacaaccttgccattctcgacaacagcggcataacgcttggagcgaagagggcccaaaagaccgctagcgtcgaagccagcatcaaaggccttggtaaactctccgttccagtcggcgacaaagtgaacaccactttgctcaccaccgtcgaaagacttcttccaagccttggtgacgaaaacgtcatttacggcaacgacatagattccgctgatgcccttggcagcaaattgcttctcatttgcaatatagccaggaacttgagaagaacaaggaggagtgaaagcgccgggaacaccgacaatgatgaatttgccttgagaagggaattcaacaacctcttcgggcttgttttcccaaagagtaactttaggcaaagtagatccgacagcaaccatttttaatagtagtaataaatttgtgtaaaagttaaagcaagtggtataaaatctttaggagtaacggcgtattcaaaaaatgtcgttcaagtttaaagatagtattatcaagacaaatgggcacatgtcgttaatatatatacctttctacaaaaacgaatcttttggtgacgtcaaatcaccaaatttgtcgggatggaagattttttttctttactgttcttcatctttgtatgaagagctttgtgggctgcgagtggtggaaaatcccaaccggcactgagaccgcgcacagctgcgttttcaatggttcgtgcgatattcggtatttgactgttgtaaaaaggcaagaaacgctgagacaaagtgtttactagacagccatttttattaaaaagaaaaagaaaatggcaatagagaagattacgttatcgggtagtatgcatgcccgggtgttaattattcctttgaaattttgaatttttaaggttttaacgaagtgatgatgtttttcttgtttaattttcacatcaatatcagcagtaacgttaagaaaaaagtttgattcattttcaaggttgtttaattgctttcaagaaagtcactgtagtttcccctctaaaataggtgagaaattttcatcaaattcgattcatcacttcctgcacctctcggaactgtagataccttttcaaaatttattgctcacgatttgctttgcggtatctatgaacagataaatggcgcaaaccccgacgtggtataacgaaccgcaaatttttgagtcctcgaattcatttacgaattagaaatgttaacacaaagaccacacttgtgttcgtcaaatcaattttccgtggtattgcgacacaattagccagtgctatgaatagagcgagaaaggtggaaaaattgacaaacgcgtctcacgcatcaattgctcgtcaaaatctctctaaaaaattttaaaaagagtattaaaatatattgaaacgttgtgaaaaatttattttatagctaatactcaaatatcacgattttaccgcttctaccatctgactggtaattgataagtacgtatacaaacacattccacgtgtctattcagcaattatttaaggtacagtaaagatgcaaaatatcgtacgtactgcatcgctataagttttaacaaggactattacatcacaaaagacattaatggtaagctaagtgtctatgtttatacgatttaccgaactagaaggtaggatgaatttgggtttcctaagagttattatatacaaatacatcagtgcaataataatgaagtatatcagtagcaaaggatggatttgggaaaacggatgtggaatagtgaattttcgaaagtaatcctttttcattgtagctaacattttgttcttctccctttctcatgatgcaagtaacggagttagatgtttagaatctcattttctttttccaaagaacgattaacggaaaattcaaaggttttgtacgtttaatcattaataaaaaaaaaataataataataatgataataatataaactattacctagtaaaaaaatacatacgataagaattgtagtgaaatatgaaaatgaattttttattaatttagattttttaaagattaaactcattgaatcatattaagcataaaaagactggtttttttaatatttcaatttttttgcataaatttgttttacatagattttttaaattgtatttttctagatattagtcctatgggattggaaagcccaacattaaatggataaaaatcatatgtcaaatacattccgatggaatctcatttgaatatttgttcaataccaaataacaaacaaatagggagaattaaaaatcaaaaatagcttcttggtattcattaaagtttcaaggtttcataggttattaagccgatttccaaaaaaaaaaaaaattagcttttctaaataaaaattgtcgatcgctcaccagcatttataatcatggctaggatctttgcttaatgtgttttgcatttcaaggatccccacataaagattaattgcatgtatacaactgctgctaatcctaggcaaagcgaaatgaaaccaactgtggttatattataaatcgcaccaccacaaatggagccaaaagtattggacaaagacactcctacttgtacgactatgctggcggtattatgatgccttggatgcaactgtttggacgaaagggaaattagaggcgcagatccaatgctatagccataaatcatcaacgaatacaagaaaaaataaacttgcatgggtagcttgtgaactgcatctaatactagatgaatggctactgccaaaattcccaagaataggcctcccaacatgatgtgtcggtcttcgagccatcgagacaaaaatgaactcgctagaataaaaggtgccacgattaatgcggataatgctataaaatttcctgattgaaaagcatcgtaattataaagttttcctgtgtaaatggaaatactagcttggtagccgttcacggtaaagtatgctataaatgccacttccgctaaaaagaaaagcaaaaatttatgtttccaactcaactttggcctgtcctcatcatcattttctttttgttgtgaaactttttcgcttttgtcagccgttacctctttgaagaagaatatgatagttagcatataaaaaaaccacataaacaacatgacccatgatgccactgtgtactgattccaaacagcgttctttgaatgaattgtcgcttttgctaatatacctccaaggaagggacctgccatgaatcctaaggtctgcgctaagatgttcattgttgccaagaatgttcgacgattttgtccgacgagcaacttatctgttgtatattttttgtgatataagaaggtagtgaacccaataccgttcagcattcgcccgattagaattagatagatccaattggcacgatatgccatgcaataaagtaaatggccaaaaatgtgagcaaacgaagatactaccattggtcggaagtacagagtataaccgttagccgactttgggtttgcaaagcaaagcatgggataaagaaatattaacgaaattaaagtgggaatcccaattaccaaacctgaaaatgcatttgtaccaccaaggctttgagtgtaagaggccgacgtgggtaaggccacagccaaggacatatcggacattaagctgttaatcaatatgaacgcaatggatacctttgggggcagtttgttggcattttcgtctacaggataagttggaacaagacttgaacgattactctgaaatgtttcagtaaccgactcgacttctgatgctttctttggataggtataaaattcatattcttcggatacttggtctacgaaaccaagatctttagaggtgaccttaaaataagtcggcctactgtcaacccttgatcggcgacgactaatactactaaaagagccacttcgttgtgatggctccatttgtggaatactcctagataatcaaaaatttttttggtagataagcgattcaaggagttttatgccgatgaagcctatagtatagctcgatagcttgatccagtaattgaatcttgcacgtggctattaagctatggtgcaaaactaattagtatctaatcttttcggactgaaagttattttagcttacttgtagtaagtgcactggagtatccgaaattcggtgtttggattttttcattttttcactagtcgcttattttagtaacttaggcgacaaacatcatatagtttgtattagaaatgataattttaatatttttgtttttgccttttttttcctttgtttttttgctaaaagaaccccaaatgtctataaagagtttggtttgtctgcaatgttggatatcaaacttgaaaataatttagactatagcatgcttgttatattatattgcttttcattagcgatgtagttagttaatttactttgtttcctgttaaatctttcgtcgtatatctacaactggtatagagtctctgattaaagttatactatctttctaggcgactaatacataaactcttttacttgataaattcaattttataattgtgatgaaaagctaaagttttactccaaattatataaataaataatttttgtaaatttgatagatattttatgtataggtatagatatatatatactaacaagggattgtgataatattatataaaaagtctattaccttttgtatagcttacaatattgtaacaaattaagaaataaatcatataaaataggaataatttttagcgaactctttgcattagaacgaatgaattttgtatattgtatattattcatgagacccatctaatactattttttatattaattaaaaaaaaaaaaaaaaaaaancctgttgaaatatgtatttggcgctaaacaatctctgaatactaataaaattttcgctataaatattatcttgtcattgtaatgtcatttttttggctgtggaaatatatcgtaaaagtcataacttatccaaaagctatcaaaaatgcaaaaaaatgcatcaaagttgatacttagaaaacggcataaacatgccatcgtcttcattcataaaattatcagtaggatcattagcaaacaaaagcaattgagttcgacaaggagggcaaaagtgcgtttttaatgcccggaaattgaattctttattctagttaaaaaaattacaactgtaaaatgcgtttaagcagtgtatttacgcatacatgtattcgtacactccatatatatctatctacatacattccttttctttcttacctttataaggaatcataacgtaattaatgtattctaaaattaatgaagtgcgctgctttgccttttacaaaccacaaaattggttgattatacttatttttcataccaagatgtactctttttaactataatatataatactaagcataaaaattgtcatataaaaaacgccaaaaaaagaaaatatttttaataattcgtgcatgtatcaaagcagtaaaaagagacactgctgacttataattagattaatatctttaaaaaaacggagtttgttaacgaaggaatgcgatagactcgacagaattaaaaaggggctcgttttgtgcgctgtggtgaacaaaaaatattagaaccgcgtttcattcttatttaatttttttgttataaaatatctatgaattattaaatgaatccatttgtcgtttctttgttgcttttttcattccgttcgttgattatttgccaaactcactaccattcaactcatactgtacctatacgtagcaactacctcatactactgacttgaacgtcttatatgcttgtggtgttgcgtagcctttaatttaggttttttacttatttcttatattattaattatcagtcattcaagttttttcactgtttagagcacttgcttctcatttgcaacttgtcatccatatctatctagctacctcatttattcgacagttaaaacatcagcctaatccttctacctcccttcttttacttttctcatttttatctcgtttcagcttttaactgatttgcttacatctgtattttgtagcgtgccaaatgattacaacacttgccattgctcttttcattgctgtggtcgccatccattcacatatacgaagaaaaatatgcaaggaaattggaattcgacttatcaaaaagatagcccctgtgaaagctagtttatacaaacaagtgggcgtggagccgaaactagcaagaaccgtcgggttttttcatccttactgcaatgctggaggcggaggtgaacgagtattatggacagctgtcaaatctgtccaaacggagtttccaaatgttatttctgttgtgtatactggcgacaatgttagtaaagccgaaattctgcgcagagtcaagaatacatttgaaatcgacctggattcttccaaaatagtttttgtttatctaaaacttcgtttccttgtgtccgccactacttggcatcggtttacattgcttggacaatcgctaggaagtatgattttaggtttcgaagctatttatcgatttgcacctgacattttcattgacaccatgggatatgctttcactttttgtgtcgttaaaagcttccaaaatattcctgtcggcgcgtacgttcattatcccacgatttctaccgacatgctaaagtccttaaaacaagtatctctacttgctaaggttaaaatggcttactggagatggttcgctcagttgtattcagatgccggatctcatgcggactatgtgatgactaactcttcatggacgagaaaccacattgcatctctttgggggaaagatattcaactctccgttgttttccccccctgtaacacttcagagcttgaaaagatcgacattaacagaaagcgcgaacccactcttctttatcttgcacaatacagacctgaaaagaatcatgaaaatgtacttcgtagttttgctctctattttgaacagcatcctgattctccagcgaagctattactggtcggtagcgttcgaggtgaagaagacatgtgttttgtgaatcatttgaagacccttgcgactgaactcaacttacaatcaaaagtcaaatttgttgtagatgctccttggcccaaggtagttgagtatctaggtacttgctctataggtgtcaattacatgtggaatgagcattttgggattggtgtcgttgaatacatggctgctggtttaatacctgttgtcaacaattcgggtggcccaaagttcgatatcgtgattccatggattggaaagcctacaggttttcatgctagcaccattagcgaatatgctgaagcctaccataaagctcttacattgagtcctcaagagcaattagagatgagaatcaatgctcgttcagcttgcgctcgttttggcgaacacgtttttatgcgcgattttggaaatgtgtttgccaaactccttcgtgaagattacagtcgtacctaatatgttgttgtctatactgtttaattcatgaaagatgaggcatttttttttaaatcctttcgtttctacttatttgttaggtgtatccttataaagtttattactgtttttgtttattaaacagtttactttccctttttttcgatgaatttttaattcttcattacttcttctcacataataaataacagtttggggcattaacgttgtcaattacaggctcttaatcacctcttacgatgtgtattattaaatgagaagccctcattcattgtctctttcttactgcttttaatgctgttgtaccaggttggtacttatttcttaatttaattgattcgctcttttgatattcaagtaattcatatcaaatattcttgaataaggaaatttgaaaattataattttctcataaaaaatacagcataaaatcaggctaggccggtacgaagttaagtgctgacaatattgtgaaaagcgaaacttaaacaagtactataatgccattgtaaaactaatctccatactaactagtttaccgttaagttcgttgtcgataaatttttactgaatggaaatggtcttcagctaagaatgctaacattattttctggtaataaaccttgacaaacttgacaacgtaggtaggcattcaaagaaaatcataataatcgagaacacattattatcacaatcaattaacaatgagaaattaatggtatactagttgtttaaggaaaagctcacattcctattacctattcattccaaagttcgcgaaaaggctataaaaggcaattaaataggctatacctccaaaagaatacgtctagcaatagtttttgaataggagaatacggtaaatgggttctaggtctgaaaaattaatgcacgaagtttttgaacttctatactaattttttattcatcccatgaaattcattgaatgctatttgatatgagtttacataagtgcgttgtataccattaaggaaatgcaatacggtatacgctaagtttgagaaactttttgtcgtgataaatagaatcattttaagtatatatcttcaggcaatgatgagacctcagttctttataaaataatcaatctcgattgcatttaattgttaaccattcaattgcaaaaactatagcgaaagctagtaatgtcgttaagtttcgttaaatcaaatcgtattgttaagtaagtgaaggaattttgttccaaaagcaaaacaccgcttcttttttaagaagaaaatataggggagattataatcaagaaattgattttttccgagttgaattcaacggaatgtctcttaaagttcaaaatccgaataatgtacgggtttacacagtttctggtgaaggcgtaacccaacgcttacctaattggattagtaaaaggaaattgaagaaagattatgctttgtctcataggattgaacttttacaagattttgaataccctgaggctagtaatcgcatcaaatgcactcgagacggcaaatatgcaatggcaactggtgtgtacaaacctcacatcaaggtttttgactttgcagaaatgtctttgaagtttgaaagacacacagatgctgaaaatgttcagtttgagattctatcagatgactggaccaaaagtgttcatttacaaactgatcgaacggtcgattttcacagtcagggcggaattcattattctactcgaattcctaaatatggaagagatttgaagtaccactatcccaattgtgatttataccttgcggctgctggcgatgaagtttatcggttgaatttagaacagggtcgatttttaaatcctctcaaaattgaaagcgcccaaattgacagtccgactggtggtgttaatgtaatagatataaatcctatgcaccaattgttggcttttgggacagatgctggcagtgtcgaattttgggatcctcgtgatcgctctagagttggaatacttgaaattcctagcactgtaccttctactccttattccgacaattctcgttctgtaacagctttaaaatataggaacgatggacttaatgttgcgattggcctttcagatggtgccaccctgttatatgatttacgttcttcaagtccttacatgagcaaagaccagggttacagcatgcccattaaatctcttcactggatggatagtgcattagatggaactgcgagggtactttctgctgactctaaaatcattaagatttgggaaaaggatacagggaagccttttagctctattgaacctacggttgagttgaacgatgtttgtcccattgagggtactggtttaattcttacagctaatgaaggttctcctatgcacgcattctatattccatcgttaaatcctgctccccgttggtgttccttcctcgataatattacagaagaaatggaagaaaatcccgcgcctactatttatgatgattataagttcgtaactaagaaagaactccttaatctcggtttagatcatcttgttggaacaggtgttattcgtgcttacatgcatggtttctttattgataataatctgtatgaaaaggcaagactgattgctaatcccttctcttatgaggaacatcgtcaaaaaattgtcaaagaacgtctggagaagcaacgtgcaagcaagattcgttctcagaatcgtccaaaagtcaatgctggattggcatctcgattatcttatcaagagaacaagttgcgtaagaaaactggcgttacggacggacctagcatccttgaagacgaacgtttcaaaaatgtattcacagataaagaatttgaagtggatgaagatactttggaatataagcaattacatccttctaggtctgaagcaaggggccttactgctgcggaagagtccgaagaagaaaaggaacataccaagggtattaagtttagttctgatgaggagtcactgtctgatatggaggaagaaaatgaaaccttcgatgcacttgttgacagaagaaagacggagcagcaggtcagcaatgaaaagacacctcaagaaaccattcgtagtactccctctggtatggaaatgacattcaaggttgaaaagaaaaagaagtctaaacctgttaatcgagacgaggattcaacgtctggcaaaaagaaacaagttactcaaggtcgacgttcagctagcaaaaacgttttccgaaacatgtaaccaaagcacggtagaactgtcaaatttgtgtttaccactacttggcggatatagaaacatttgcaggcgtgcatacattatctgtcacttttcataaaaaatttctgtgttgtatacatcttcatttagctttatttttggtttagcaagttggtatttgggtttcgcatacgatggattcgtgtgctcaaaaaattaatttcggtttttaataggtaagcaataagcaatttaatgaaatatctactttatgtatctatcattgttttatgattacttcttgttgcaatctggcagtagtagattagtcgcccaaaatttcaagttttgtttatttatttatttagaagcaggttcgttttttatatgtaaactaaatttggctgaattgaaaacattgtcaacaaattatatatatcttagctgtggtaatgtaaagaatctggtaatccacttcgtattgcaacatctacttttctcgccagtataccaaccacactgcaacctcatgctattgaatatagtctaatttctctaagacagtaaagcaagttttaaaagtcatatgtttttgatcttttttaaagaagtttctgttttttgaattattttgaagaaaattatttgtatgtaagtttgtgatcgatggatagtcatcatatgatggaaagatcgttaacctttgaaagaaactattctcatttatttataataatatttataataagagatatgagcagctcgaactcccgagtgcatgaggaacagcctccaacagaaaatcgcagatatgcgagacctactgcacaaatgaatcgagtaattgaacaacaaccaaggcgtcgcgattacttccaaaacaatgacaactctggtcgcagaggttataataggcatgaaaacaatggtaatgcgcaggatgtggtacgttcacactataacgcgcgtcctgatttgggttataaaaaacgacaattttctcctattattcaactaaagaggtttaacaactggatcaaatctgttctcatacaaaaattcgcaccccatgcttctgattatcctattttggtactagacatgggatgtggaaaaggtggtgatttaattaaatgggacaaagctggcattgatggatatattgggattgacatagctgaagtttccgtaaatcaggccaagaagagataccgtgaaatgcatgcttcttttgatgcactattctacgctggcgactgtttttctagctcaattaacgaattacttcccccagaccaaagaaaatttgacgttgtttctctacagttttgcatgcattatgcatttgaaagcgaagaaaaggttagggtcttgttggggaacgtttctaaatgccttcctcgtggtggagtaatgataggaacgattcccaattccgatgtaattgtcaaacatattaaaatgcttaaaccaggagaaaaagaatggggaaatgacatatacaaagtcagatttcctgaatcacctccacgctcttttcgacctccgtatggaattcaatattatttttatttagaggatgctgttaccgatgttcctgaatatgtagttccttttgaagcctttcgtgctgttgccgaaggatacaatcttgaattaatatgggtaaaaccttttttggacatcttaaatgaagagaaaaactctgaaacgtatggacccctaatggatcgaatgaaagtcgttgataatgaaggacaccgtggaattggtggacaggaaaaagaagcagcaggattttatttagcatttgcctttgagaagaggggaatttagtcttttctttccttatcccactgattcactgtgcagaccgcattgtagaaagatctttcacgctcgaaagatcagtacagtggtagaaaaaaagatgactttaaaagatgtagattaatttttgatggcaatgacttttatttatttattcatttttatgcctttattctttctttttctgttttcatatattttatacataagtaacatgctctctttcattccagcttaagcgaataaataaagtatgctcccaggcatatttcatcaaatcagattgccccaaaaattgcctcaaatattaagcgatagcttaaatcaatgcacctgtcggtattcaactaccagcatccactgctactcttcttccattttttcttcagcaacagtcaagttaaaaaactggaacgttttaattgatttgagagaaaatttcttatggagtaatcgattgattaaatgataaattcacattgcgcccttttttagtctcgattgattaaatgagtcatctgcttttcgcgtattacctttgcaacgacattcgctcattccaaaatctactgaagcaagatgattcaaaggtgaaagagcctagaaagggtttttcggaaaagagcggacaaaaactccgtatcaaccaaaaagatcgatacggacgcaccgtgctgcacatcgccgtttctgagaataaaaattcctttgttagatctcttttgcagcataaaggcattgatgtttttgtgcaagatgaagaatctggatatacggcgttgcatcgggcaatctacgttggcaacttggaagcagcgtctttgcttttatcaaaagatccctccttcagatcattgcgtattaaagacaaagaaggtctttctccatttcaatttttatcacgagtcctttcaagcactattcatccggttcttgacttaccgataataggaaatgaactttatggctttggtactaacgtaaacaatacgctcggaatagcaaatgggaaagaaccttcatcgccagaaagagtgtttttactgaaaaaccaaacagagtctcccacatcaggtcaactcttttcccgagacaaaatccttgatgtgcaggcttccaaatttcacagcgtcgtactaacggatgagccgtcgcaaaatgtttacgtatgtggtattggtgctggagggagaataggttttaacacggacgttcaatataactttattcctattcctggtatcattcataaagttatccagatttctgttagtcatacccattcacttgctcttacaaagttcggaagtatttattcgtggggaaagaatggttctggtgaactgggactttctaatgacgaactgaaaaaggatgatccaattcaaattacccctaggcgtatctctgcattcaaggattatcagataattggaatggcggctggaaaaagttatagcgttgcttggactgacactgatatttacagctgggggttaaataatggccaattaggtatatctgatcatatttcagttgtttctactccaaggagagttgctggcttattatcgcctgtcatacatgccgtttgtactactcgtgctacgatatgccttttacaaaacaacagtataattgccttttgcaattataatcaagtgaaattgccattcaacgttgactttggtagttcgttaaaggtaactaagcatcctctttccctcaccagatttaacgttagaaaattattagcttcagaaaacaaactagccgtgcttacagaactaggcgaagtctatgaatttgatatgaagcttttacttgatcgtgattctacctcttccaagaattccacacgaacttcattcaaatttactccattatggatttttgaatcttcagaccttgcagctttagatattgcgtggaccgctgataattctttaatactatgtactagaaatggcacttgttggaaacgggagttaaggtcaaaaaagcgagaaaagtcatctagtagcccgtattctagaggaccatacaaatataatagaattgaaaatttacaaatggttgttggagtccgtgcgagcgcttctggatcattttttgcaattcgaaatgattatcttccaccgccaatctacaagccttcgaatatgttaattgatcttttgcgctcactacttccctatgaccaccttttacatgtaagacaaccacgtttgattcctcccgaagatgaagacggagtccctatttttgacgaagaccgcgctgcatccagcaatgagatgcagctactttttgaaggatctataccgattcttactagttatgaaaattataagcaatcattttctgatgttactatttattgtggtacttctatgttccactcacataagttcatattgtgtgctcgatcttcatttttgagaaaattattgctacaaaaaaagaaatcgagtgtctccaacatcatttacattgaagaaatcactcaatctcattcaacaattagagttgaagatattcctcctttagcggttgctattcttttgcattatttgtacacggatacattgctttctccatggcatcttgattcacgcttttcacctttaaaagaaaacctttcaaaacttgcaaacttactggagttacctcatttagcggaggttttaccgtttagtgtttcccgccaacctttgctttctttaacgaatgacattctgcaactatataataatttttatgtcttatgcgaagaaacaatggatacagtaataaagcttaaagatggagagctcaaggcacatggtctttttttaagtctccgcagtgaatactttagttcttatttccaatttgtttctatggaaagcaatagttttgacatcccaataaccgtcaatttgtctcatttgactgttgagcatatgtcaattgttcttcgtcatgtatacagtgacttaaaagttgagctttttgacgatttgaaagaatccgattttcataattggttggaaactatgttcgaaattttgtctattgcagacgagcttctttttcttgaactaaaaagcatagcccagcaatccttacttcgctttttaaatttgaaaactctacctactctaatggatctttcacttagttatcacgctgaggagctttattcacgatgtattgattatgcttgtcacaatattgaattctttttggaagcaaatcgtataagtgaatgggatggtttccatttaaaaaaagtcgctcaacgtttaactgaattgctttctgatcaacgagtacatcttccttctagcaagattgctaatagattattgataagagatccagtgttgatggaaaaaagaaattatgagcttaaagttctcagagaatacttgttttcccaggaaagttctcaattatgggacgattccccttatcggtctatttttgaagatcgtcgatgcagcacttcagcagtaattttagaatctggaattgttccttcaagtaatcaaagtgattcattaaataaggaagatgctgaggagaagtctcctaaaccaaatgttgttaacgttacgagcattacaaagacagcaggagcttctgttgaaattcaaaacaatatagagtctgcttcgtcaggaggggataaaacacaattaaatggtcctggggctgatcaacctgttactgcaacaattacttttgacaaaacgagtccatggaggaatagggaaaatctttctcataataacaacactactagagctagtcttagagaattgctggagcaagagaaagctgatgcttcaactactacggttttgtctgattctagatttatgaaagctccaactaaaaaatcccaacgtgagaaaaaaaaggagctttcaaagcaagtgcctatttccaaaacaaatgttggccacatcgatatcgagttgggtaaatcgaatcactcaaacccttggtctgtagcaacacatcagaggggcagtttttcgtcatcaactggagtgaaaaagtcatttaatggtattcttagagaggcagctcgagaggaaggttcatctcaagtaatttatcaagaatcgaagaagcgcatttccaatggttctccaactagttggaacctacttactaaaccatctccccgatctgcttctttaccaaaaaatagccaacctttatcgatttcggagattatgactgagcagaaagaagaaattgagagtcaaaagaggagatcatcttttagaaaaacaattgaggagatacaacaggaagaggagtttcaaaagtggtgggaggaggagagtttgagagtacagaaagaacttggaatccttaaaactgaaagagatacctctacgaatagaaaacagggacaagcttctaaacaacctcaacgaaggcacagaaaggaaaaagattccaaagtgtcagagtccactgcggagtttaaatctcttcctattgatataccaaggactactcacaagaaaggaaaagcacgtgcagtcaaatgaccataacaacgactatatacaaaaaattcaggacattaatttattcaacttatgaagagatactttaatagatatgtataagaaaaaatatttgctacatggtgaattatttattaagcttttgtttcacgataccaatcacacattttacatacgctaaaaattcaatatttgaaaataataaaattgaataggaaactttggtcataaagaaattcaaagcacgtacggaatgaatacaagaattcgatatacacggtaatttatagtgtatcaaggacagatccaattgtagtggaaaaattataggagaaatgatgctgcttcgtaaattcactagagaaaccgtgacaagcaattacaaaacgagcaaagataaggtttgtttccattcacctaaatcatcgcaaaatagccagaggtcaaaacggaaagggcaagaacagcataaccggtacgatagacaccctttagacttaactccttggtggtatcccagatcaagtgacgaataccgttaaaaatgtggaaagtcaaaggataagaaataacaaacttagcaggaactttgatccaggtgggaacttgctgaataagaccagaaatggtagctgtatccaaagagtatccagcgagaggagccaccaagtagcccatagcgaaagcataaagagtaccggcgacaacacaaccagtgatacgatgtaaactggatagataccaagtcaattgaggttcatagatagtcaaatgaggagaatttggacggtgaacacgctgggaagcaagacgagaattagcctccgtctgggtcaaatgttcggttgcaatagagcgtctccaaacatttcgtaaagtagagcggccagcagggcgcaacagttgagcagccggacggaataaagaagagcttaggcagaatgagcgagttgcgaacatggtcaaattgggtcgcaaaaaaaaagggggataattcaaatttttaaaagaatacttattcaatagttgtacagtgtaaaaaatggatgcagacacaagttttcaactgattaattatatgtgtactgcaacaaatggtattggtagctagaggaattgcgcagtatgttattggaagatattttccgcttagcaattcgctcgctgtaggcaataatgttaaaaggccggagttcgaattatagaaaccgaccaattttatattttgataaaaaccattttcttttaataatttggaaattttgtcgagaggcattcacaataaagattttctgcattttttgaagacagctattgtattaaaaaactgattggaaagtggaaaaggtatattaatattttggcaaaggatttcatttactaggtaaaaatttgtcgcctcaatttaacagtactttttgcagggaaaaagggtataaagataatttacggaaaagttaatagataaaaagacttaaagaatgtccttttcagaagatcaagcaatggaagaagccaaactgagaaatgatgaaactgaagagcaggatccagtggtgcggacatatccggtatttttctcacccggacttagaaataatcttttactaaatcaatttccccttcgtcctaaaaaccgcacatacagtgatgcaaatggtgaagcaccaatcgatgttcgagtgaaaccgaagactggctggatggaggtcgatgtacccattcctacaacaaaatactataatgaggataaggcaatgaaatatggtaacggcaaaaagccaattcagacccaaacactttctggaagacttcagaaaccaaggaccaatttgatggtcggtctaattcgcgacgggcaatttcatattgtgccgttgcgcggtttaacgcagctgaggccctcaatgaaacatgtaaatgaatatacacaaaagttaaaggctgctgctggcccttcaaattcttcgtctggtacgtctaccccacgtggacccattcgcgcagtgcaggttactgccaaacaaaatacagaagcaccaaaagtctccaccactcacatagttagagcaacagaggaggaggaatgggttgagttggactgtcgcccagaacgcgagtccgagtcaatattgaagcaattagaatgtcccatcgaacatcaaccaaacgagtgcgctgctgttgatgaagattactcctttatttagtttaatcaatgcgtttatgtatatatttcttcacgtaaaaactgcttttagtcattgcaaaacagataaaattgacatgactctcattaattgctatacaagagtaagtcgtatttacttacagatgctaacatgatgactgaaaatattgacgaaattaatatcaaccatttttattgctatatgcaatttgcttaatcaatactgtaccactttaaacactgcctgctacaatagtgcataacttctatttcacttggtatacaaacaaaaaaaaaactctacttgtacaagtatagactccaatgattaaaccaaagcatcgaaacatctcatttatttttaactaacgacgagcagcaaccttggcattcttaatagcttggccacgagcagagctggcagcagacttggccttgatggccttcttttcagattcggaggcggccctcttatccttacgttgcttcaaagcagcggcacgggcagcagcacggacttcaggacgttggttacgcttctctttaatgacatccaagttagcaccgacaattccacgttggtgcttgacggtacgacgagtacgcttcttagcatgctcctcagagatacccttcttgtgcatacgacggtaaaggacagtccatgacaaacgacgggggttcttgcgttgaaggaaaaggctctcagacttcttgttgacaaagcggaaaaccttgttgtctccacgaacaaagagtcttccagctccgggataaaccttggatccagaaaatgagcaaacttccaccttcatttttcctagtagttcgtggtcgattcctctaaactttcgtgtatcgtgttgtgtcgtatttcaaaaaatagtcacaaaccctaacctcatattttaactacggacggactcgttaatggatttaagactcacttcctgttcaatttttatttacgccttaatttggtaaaagggctaaatgcgttagtgactcggtggagtacaatgcgtttattttaaatagcagaacctggcagctgctgcaatatttgtataatacaaatataatgatcccgtactagtaataaaaacctggttttaagtacatttgtaactgaaatgcaagtttactaggtttaaaacattctttattaaaagaataataaaagttagaattatcgcaaacttacttgtcaaagcagtgattcggtgggatttaatgaattgtgaaacgtagcgcttgctgtttgttatttattggtctagggtatttttcaaagattaagtaaaaggaattaattttttgtccagcattcaattctatatacctttcctaacgcaaaatgttgcttcattatacgcaaacaatcaattgcgagataggctcatttccataatttagcagcatgtaagcatcacgaaaagtaagagcagttaaataacggtttttatttgatcaaaaagatgataattatgattactgtgataagaaatgggcataacgctcaatgtctacgtttcctccacttataatgataccaattcgtttattctttagcttttccttcatagcgcgcgctgccgcaaagctaagacatccagtgggttcgactacaattttcatacgtgcggcataaaacttaagacagtcaattagttcctcgtcggacacagtcaatatatcatcgaccttttcttttataatggaaaacgtgtagttacccaaatgttgagtttgagcaccatcggctatagtttttggtgtatcaatatgtacgatagatcctttcctaaaggactgttgcccatcgtttccagcttcaggttcaactccataaacttcgcagtttggagcaaaatggcgagcagcaagtgctgatccagaaagcaagccaccgcctccgagacaaacaaaaagtgcatcaagagggccaacctcttcaaacagttccttagctgcggttccttgaccagcaagtacatgggggtgatcgtaaggagggataatggtaagaccttctctttcagaaatttctttggccatcttttctctatcatctttgtatctatcatacatgattacttgaccaccatagcctttcgtggcagcgaccttggcttcgggtgcatcgagtggcataatgatttttgctggaattcccaagatctttgccgacagtgcaatggcctgagcatgattaccagaagaaaacgtcaaaacaccagctttacgttgagcttcattgagttgagaaagagcattaagggcaccgcgaaatttgaaagcacccattttttggaaattttcacatttaaaaaacacttctgccacaaactctttatttactgtgctcgacgtgagtactggggttttgttggcgaatttcttaattcgctcactagctgaagcaacatcatcataggtaggaagcaccaggttatcgctcattgtcgtagttttttaaaaatttaaaaagagtgaaaatatccttttattctgtaaactattcagtcttaaaatgcaaactgaagaatttaacgacaatgagagatgtcaaatcaagcagagctctcgatcatttatagagagaaccgtcaactgtaacgctatcttatctttactatgaaaagaaggtcaaaaaatgcgagcccaactcggaaacgaatttataggcgacaattgtaaagacacttacacaattagaaccaaatggaaatgaaacagcaggacggagctccaacttgctagttcataaaacagtgacatgtagcatagcgagtataatgctaatcactatttgtagtattcctctgtaataaatgttaacattatatagtgagaatttcaagatgtagaaacagtctgttaagagtgtcatagaatataacgaaaatgcatgtataacaattgtttcgactcattgagtgccagaatagtaacgtctttctacctttagcgtgatgaacagtcatgcagcattggttaaatatatcaatagtttgaaccaagcctcgttaatttctgtaaactgtatctgctcagcaatggacttgactgcagcttaaatcagtttagaaataaatatccaacaaacggtgttttgactttcacattactatgcatataactcgttactaaagagttctttttttttatgagaaatcttaatcaagaatgaaaaagctgataattaatgctaaaacaatcgcagaattatataatccgtcatggtccagtggctaggattcatcgctctcaccgatgcggcgggggttcgattccccctgacggagattttttatcgtgtacttttctaaattgattgagaaatacgataatttattatcaactacaattgttaattcacttttcggtccttttcttttggtgttactctacttactgaattcttttcttttcttgttagttagcactgtctccttctgaagcgttaatattgtaagtattctataactagtattgaatagttcactgtatatcgttattcggtaaacaaacagtggacacattgaaaagaataaaaaacagatactaaatatacttttaagcctgtggtattgggatgatatagaatattctgtttgttttccttttatttattttgttgagaacgatacatgtcgttttttttaataacatttgtagaatcgaagtgggttcgtatgctaaataaattcgttcataatttccatgtaaataatctttgaaacaccctttgagtattcataaataacaacgggaatcagagcctccttcttagtttgaaagaaaggaagataatagcaggctgtgttaagactcagtaaacatggtgttacctcaaaatgtaaacaacaacgctcctacttctggacgaacttgtcaaaagccaacatcagcgtttttttacgaaataatgtcagattcaaagttggcagattctttgaattgcctttctgtgtcaactccatcaaccacagctaatcctgggagacaacagcttttacgacttgcagtatcaaaccaacgacaagtaaataatgttagtctagcaaatgggaaggaaaacaaacggacttcaaatagcaagttcaattcttcccttcgtaagatagaagagccaattgctggagtaccttcatcagctggtcctcaatggcgagaatttcatattggaatgtttgaaattggaaaacccttagggaaaggaaagtttggaagggtatatctagctaaagagaagaagaccgggtttattgtggctctcaaaacattgcataagtctgaacttgtccagtcaaagatagaaaagcaagttcgacgagaaattgagattcaatcaaatcttcgccataaaaacattttacggctatatgggcactttcatgatgaaaaaaggatttatttgattttagagtttgctggcaggggtgagttgtatcaacacttgcgtcgtgcaaaacgattctcagaagaagttgcgtctaaatatatcttccaaatggctaacgccttatcctacttgcataagaagcatgtaatacaccgtgatatcaaacctgagaacattttattaggaattgatggagaaatcaagctttctgactttggttggagtgtccatgcaccttctaaccgtcgtaccactttatgtggtacattagattacttaccacctgaaatggtggagggaaaagagcataccgaaaaagttgatctctggtcgttgggtgtcttaacttatgagtttttggtgggagcaccgccttttgaggacatgtctggtcattcagctacgtataagcgtatcgccaaagttgacttaaaaattccaagctttgttcctcctgatgcacgggatcttatttctcgtctattacagcataatcctgaaaaaagaatgagtttggaacaagttatgaggcacccttggattgtaaaatataaagattcatggactcgcaaaagttctgaatcttcctaaccgccatcttggtactttttatttaatttttccttcttctcactacatttttgcattactactttctttttgtttcagcgctctttttaatcgcgcagctcactatattccttcagaacttttttgatctttgggggttatggaggtttaattatatgtaatataacacactcatttaatagaggatcaccaccataaactaatcgttttccagattttcttttcgaaatcacttagaagacattcattttcctaataaaaactatttaaaaatttatcatcactttagccaagctaataataacttccaaaaaaactgttacaatatgtataaagataaagtacgccaagcacataataagttgcataacaagtgagaagtatgcttcgatattttttaaaagccaacgtaaatgctgtacgggatattataaaatgggaggggaagggagttgacataataactatctgacttttgtaaactggtatttcaatagactagacgaaagaatgaatagttagtacgaagaaaaaaatgaatgaacaaaactacagcgaacgtacttttttcaaaaggcctgaaatcgttgaaacaggaattgaacacttcttcaacgattgcttctgcttgctctttgcttttacaattcgggttaccttgtacggagatagtagctcgtcgtttgacgcattcttgatgatgcttccgaaaagttttaatgttaccaaaacgaagttctttggtccagcgacactcaccactcatactactagcacgaatttctgaacaagcctgatgtctcaaattgttccaatcgacttcaaacctgtggtcgtcaaacatgtgtatcatttcatgggcaattgtattctctgccatttttttagtataaagtctgttttcacacagaactatccctttaccgggaatgtaacctccagtactttgtgcatcacaaggctggcaagaaatgtctttagcttcaatgttgcaattcaaacgatccaaggcagtttttaaaaaaataattactggagattgggacattaaagcgcgctttacgcgctcacaatttttcctctctttcgaccaactttgtggatcttcgctcatatctaaatgcacgtttccttaattcttataaaaaggccttcaaaggagtttatggagacaacaaacgatatctctaataaatgtcaattaataaattttacctgtacaacattaggtggttgagtagcaattcgcatgaacaggcgaaaccccgaaaatagtgatcgacagagggaaaacactagtgaagttcttcgtaaatatataagaaagattacaccctttccgagcccatggactgcaaagtgagggagtatcgactttttttcctattcacagtctgctgaaccctgctatgtgtatcagattgcaagctctttcacataaaacagtacaacgcaaaagttttgcagtttataacgttatttaacgtagttaagagaaattgtactcgttatacgttatagcgtaaaataatttgcgctttgtgttatacggtagcttacacttcgaatgaagcagtaaacgtttctttctgttctttacctaaaacaaaaaaatcttaaaaaagggtcttttttatagatactgaaacaatgaggcctttaactcatgaagagacaaagactttctttgaaaaattggctcagtagtaagttcattgcactatttcattgtgtttggaatatttcattccatcgagtttcttataaagtgttgggattactttttacttctaatactctacaagaaatatttatgttattttctacgttgtaattgcgttactgactagtaaaactagcattggaaaaaatattactcatttaatagaccgtccggatgatcctcattgctttcgtttacaaaaagatcgtgtttattatgttaggtaagatttttgaatatggccaccattcattctacccctaatatcaaaaattacgctaaaaaatgaccttttcaattgaaacaaatattttagcgcaaataaagtgcaggacggagtgattctttttttttatttagttcaatcaagttaacatacttatagtgaacgtgcaatgaaaatggctacatctgtagctcgccaaaatctgatgtcgttgggtatttgctttggcaagtttaccaagacaaacaaatttcgcttgcatattactgctttagattacatagcccaatacgctcgctataaaatttgggttaaaagtaatggtgaaatgccgttcctctatggcaatcatgttttgaaggcacacgtgggtcgaatcacagatgacactcctcaacatcaaggtgtcgttatttattccatgaatgacactcctttaggttttggtgtaactgctcgctctactcttgaattgcgacgccttgagcctacagctattgttgctttccatcaagcagatgttggtgaatatcttcgtgatgaagatactcttttttagagtacgaacggaaaacattgcttaaaaaatataattagccttgctttcacgtacattctccttttttgattttgtagagtgtgcaggaagaataaggtctctggttcgcggcgaatcttatctttttgaatttggtgctctttttttttaaataaaaaaagagactttatgcttaaacaaaagtagttccatttacatacttttgtaaggttaaagaggttttgggcttaactgcaaccgtattggtttggcattttgggttgtgtggtttttctagtttcaaaaaaatataatatgagcttatctaaagggaaattttattattatggcaaatgcgccggcaataaataaccatctttttttcattgcctcgagcattaaaaattaaaacaattaactagtagcttgaaattgaaatgaaattatgtaccggtgtgcgagcaaaatctttatttatatgatttaagtctaattgattttattactttatgcaagtatttttcgtcctctaaaaatagcctagcatctttcgacttttgcttcggatgtataagagaagttgactcggtataacctgctgttaaaatcgtattcagtattaaagaaaaatactgaattaaactagatggtttatactaaaaatacagcttgtaattactatcataaaatcacactctcttcagttggttcctttgttttattatagctcgtgtaatctttatgcaacagccatacaaaaattttgcaaaacatcaaacgaagaaaggattaatttgagaaattgaagcgagataacgaagtaatgtgactaggtcatgagtaaggacgctataagaatttaagtgagcattttcatgagaatgacttaagcacaatatctacatatctaaaaactttttttttgacatagagaaaaaggttacatcattaatttgaagctcacaaaataatattttaaagatctatcaacaattatgcaacaccaccttgcatgctttttcccttcgactttatcttgacattggtgcgatcccgtttaggaatccagcgttgagggtctggagtagccttaggattgaagcttttaggggtgggttttcttctcttccgagtctttttactagaatttgacgaattcgcttctacagaacgcttaataggccctatagctgccgaaacaggaacacctctaatttcaatgtcgtccacgtcaattcctgtaattaaatctttagtgggtacaaggtatttatccataccagattcaatttccttatccagatagcaaagagcagcaactttacaagaaactaattcgcttattgggcccttccattgaagtaaatcatcaattacactcatatcatcttgaatagtactcactggagctctttcatcaaggtgagctagaagagaccgagtacaaagaagaagtttagcttcacacgactgttgctttctccagtagttagcagcctcatgtagtaattgggatttaaaacctgttgattgaatcttatagtgtaatgcatcgcctaatccaaccaagcccggagaatataaaaccgataaactttgagacgcttccaaacttgtgcggagcttttgatagatagatagtgcaccacgaaagtttccattagaaattttgtgttgcattaatagcaaggcaacaacaatgttatccgagtcacttttaaagagattttccaagtagccggggagttttttaggagatattagagatttagtttcttccctaagcagaatagtagaaaaataaatactttcttctggatttcttttcttctcttttctcactgaacgctgctttcccacagccatgtccagcaaggccaaatttcgaataaattgctttttttgtgaagcaagtagacttgacaaggctttctccaaatttgttccgtgaaggtcacgaaaggatatatatggattatcaatactcatgctaattaaattatttacgaagattgcctgagaagtttcgtctagactgtttatcaaaattagtaaagatcattcaaaaactgttgtcataccaatctttggaaattttgagagactctttggaggctttttcattatcaccagcttgtaaataggcgaaaaagagttgtaatcgacaaaggttaatctgagacttatgatcttcagagttggaatcagaattttcaagcttttcaagagaagacgaaagtaactcaattgcctggttccaatcaccaatagttaagtagcgcgtagcaaggttaaagacagaatcctggtcatccaaagatacagcattatttaactgcaatccaggaagctgtgaagcagcagcaagcatattcactcgaatatcagcgcgttgctcaggctagttaaaagttagataaaaaataaaaattggttttcaacttaaacataccaaatcattttcaaggtgttcgtaaattttgagtgccttcgagaagtcggacaaacgataagccttcaataagttgttagtaagaacagtttttattaaaataataaagagccgtatagaattacaacaagtaatcatcgctttcatcaccaaaatcgaagtctttttacatggctattcaaatacatttgagacataccttctgagcttgtaagtgttgaagaaattgtttgtcttcaagagaaaaatcttcctttcctaactgaaatgcacaatatgcgcgttcgtaaaccgcatcggtttcgccgaggtatttttctattatcttcaatgcatgctcatatcgttcaatatcaatcaaattcaaaactttctgatatatatcactttttgtatccccaacttcaatttttccaatacgctgagcaagttcctcaatctcctcttcgtggttgctcatctcgttgtggtttgctgtgggcaagtcagcttgaactattaacatagagtaaatctgagtgtttccaaagctttaggtctttaaaacttattttaaatttaaataagatccttaaaacaaatttaatccctaaccggagcgatattgttcaagctatacagatgcttctatcctacaatcgttcgcaatgcggtcccagtaaataatttcataaaaagatagcaaaaaattttgaaggattatacgaaagctaaatagtactgagtgattttataaagactggagaccgattcagtgcgttccaaaattccttttgggacaatatcaaaaattatctatttactaaagcgttttatgaaacaagagaagaaagtaacagatacacattaaatattaatattctgaatgattttgagctggataagtcattttgacctacacgctagttgttttgcaacgtgtttttagacaaaatagactcatttcggatatcgtgataactaatataagaaaaaagaaaaagtgaaagattttgtactatctaaaaaaaaagctgttatacagataaattagatagaggacgaaatagtaaatatgttacgagagagcatcataaaaaccaaaagaaaataaatgagtagcacttacagagacacgaatgacgaacagtttttcaattagtgctgggagatttggagaaaggagcgattatattattgaaaaatttttatagatcaggtatatatttgaataaaaacttgaagttaatgctcattgaaccataaatagtgtgtaagcagtagaatatttaatattttcccactaataaatacaaaggataatcatgtggatacgtccaaaaattattaatatatggaaatcttcgtaggtaggaattcttatttttgatgcttagccatacgccaaatgatttcacgatgaaaaaataaaactttaatatcatcgttggaaaattaggtagtccaaatttgacagtgaaatcagctgtgaatcatttataacattaaaaatcttgaaagaaattaatacgttcagcacaagattcgcttgtacatcctgggcatcgttgggtaaattgacgagaatagggtactttagcctttaaatgctctgcaaccaggtcagccattccttgaatagctgtcatacttccattaatgcttgaaacacgtttaactccggtaattcccttttgctttgcatcttcaatgtaatcttctaactccttcagagtctcaatgtgatcagaagtaaaagcaataggaacgagaatcatattcttctgtcctcggttacccaactgctcaattacaaagtctgttgcaggagacatccaaggcaaaggtccaacctttgattgccaagcgttcacaaatttattcttgtaatttaaacgtttcataacggcttggctagtagcagcaatctcataaacataaggatcacctttcgctacttgactcattggtaatgaatgagcactaaaaactataacaacatcatcacgaacatcttcaggatatgtcttcaatgtttcctcaatgttttcagcaaatgcattaatgagaccttgttgcaaaggccaacggtctacaattgaccattcgaaatctttttccattcccttttcaataagttttcttcgtaattcattgagagaagcaccactcgtggcacaagaccattgaggatattgactgaatgcgacagcgcgcgaaacatttgctttctttaattcatctaacatatcttcagtcaaaggaggagcataacgaaaggctacaaatggaagatgtggggcggactctggacattttttatcaaggattttgcacatttccgacccctgtatacgagtccaatgtaaaattggacttcctccaccaatgtcggaatagtgattttgaactttaggtgtcctacgtttcgcaatgaattttcctaatgaattttgaaaataaccgagaggaataatatcaccatcagtgaatagacgctccaaaaaggggcccacctgaaaacattagttctcgtgttgatagtaattataaatgaatataaaaacaacaaaagttgaagcgtttttcaggctgtactccatacaaacgcttcttcaattaaagtcttacctcatctaaattggaaggcccacccatgttcatcatgacaacagcctgcacacctctgttagtaatataataattaaaaatcaataataacatactgtaggtcctttaccagaaacgctcttagtaacgccattcggtggactttcatccataacggtggaagaagcatcagaactataagacgagaccgacattctattaacagaaaatttggaaaatgtgttgttaaaataatttccaagccgagaagtatggttcaatacgggagcagttctttttagtgcaaaacatgatgggcaaaatcgaatcattttggcatgagtagtcgaccgacaaaaatcgtaagaggttcgtttttaacacaaaaaaatcaaaaatttaagattgcaaacagaagaaatccttacgagcctttaatacaacaataaacaatactaaaatatatggtcaccggttggttctttttaatatatagtagctgtagtaagtcatcagcgctaaaataagcttatatttaagcgactttttcattactgctaacactggtagttagtattagttttcaacaaaaaggtcttaatgcaactgattcgcgttactcgtattatagctgtataagtactacaataggttgcattaaattagttcagaaggtaattgcaaacactaagtacttgctacaaaacaacttggtcatttaattttcatcattttataactggaattgcacataggagtacgagtgcgagtacaagcacaacattcattcttgaatgccttctacaagaatgcgttatatgaactcacttacattcaatgattagaactctccgaaatgttattgaaaatgaaggtatacgtctcattagccctaaaaaacccaatattaaatccatagtccaacattaaatgcttgctaaaaataacagaaagaaaagtgcgcatacacatcgcgcagaaattaaaatagaataaaatgggagtcttgaaaaagaggaagtcaagaaatggcaaagaactatcaggatttacgactttctgacaaagacattcttaactgaaagataagcatcgtaaatcctttctttgacttcattatcatggtgagcaacgacaatgtcgtttttcttattaagttcgtcgttcgacgatacaagagaaggagggcggcggactgttccaacaccatcaacgccctgcccctttttaagccaaggcttgatggactcacgagtagcgtcaacgaacacgtggtatacaaacaaacccaatataattaagacgaaggcaatggggtacagccagtacacatgatatccaaacacatgaataccaataaccaagctccaaaaatcggaagtcaataaagagatattataaaaagtcgcagaagacattctaaagagaataggagccaaactataaagcaagaacatgacgagaataaaaccagctaagtaaccacccatttcactagtccaatgcagggtatacaaatggtgacggtcaaaaataaaggtttgaataatgctgataatagaaccgtagagacttaattgaccgatgactacgtaaagcggcaatttggaagcaaagtattcctccaaagtattggacacaccataacacgtagcgccgataatcatgtaaccatcacccaaaccagggttgacagcagaataatcaccacgagaaatcacatcactaacgaccagcaaaaccaaaccaccaatgcaagccacgacaccaagaatttgagaccagtgatagcgaacctttaaaaagataaaggaaagaattacaactgccacagtagcccaagaatcgagtaaacttgcactaagcatgtttgtgtattggtaggctagtacaacgaaataatttccttcaacgtcaaaaaaggcaaagatgatatatttccaaccgtgacgaaatatcatttcaaaatactttttaaatcccatacgaaaaacagtgtatggtgtgtacacaagagttagcaaagcgtaaaccaagaatgtttgaaaggcaggaatattactgatgccagacatgtatccattgaatgtgttggtcgcagtaatgcacagagagagaacctgaccaaggaaaaacacaatccaaaatcttttatctagtagaaaataaaggggttttgcctttggagttgactccacctcttcctcggcggctggtacttgagaagcaggaaggccaatatcatgttcaaacggtggtggctcaatgggatgagaatcaatatttacgtctagttttttgtcgatagagggtctctcactcttgatttctgaaccattagagctttgcccctgaatgaatgcgctaccatactcagaatcggcggcagcaattgaggaattatgagtgtaatgacttttatcgaagtcagaagtactgctttcctggtatgactctacaatacctagcgggtcttgtgaagtttgaatttcttcattcaaactactggagttatcgtgctggccctcgtgactttgcactggcacgtgtatcgaaccgtcaaccattcctatctacagatcacttttcagtaaagtcactgtttatggaatgttgtttcaagaaagaaaaaattgaaaaaacaataaaaaagtgagaaggagagttcaacatcgcatggaaaacctctttcagtgctgtaacctggcgtgactgcccaagtaacaatgtgagatataaccatgagtaaagttaaacgaatgtataacatgcaaaaattaacaaagctgaagcgaaagcgaaggcttttagagctaaatgcttgtacattcatcgtttccaaatgcagtagtaaattaatagtaaaagctcgacttttgaaattaatacctgagttggcttgctattctttgtaggggggccgattttacccaacatgtgctaattttagtgaagagagaaatcttccagcttctagatgaaatgaaataaaaaagcgagtaagagagaagaaatgtgttgcttttttttattacagcactaagagaaattcaatgaagatgggatgaatgttatggactagtattaaatataagaatctcgacgctaaaaaaatactgtttgttagaatacgtaaaaagactttgtataaataacttagggaaaactagcttgatttatgtagtattctatccctcttgtagaagtgtgtaagacataaatatttaaattaatgggaatcgatattttggggttcatcccaaatgagccggtaacgtagaaaacgaatcaagatactaaacttgtaaacacatgtataaacaattaaaacagctaagcatgtatcacgagtattaacgatttggtaaatgttaagacagtttattatgtccggtcctcctgtttgctgctacgaatattcaagaataaagaagcaaatgtcaatatgataagtgaatgtttctctagaaaagatagaaaataactaagccacttgttatcagacatacagtacgtgaacataatcaagcgtatgactgaactatgattttggtacctcccttccacagcataagcttctccaagattgtttaactttttagaaattagctccgattcagttggttaaatctaggctctttagtttgtcttttaagcaactcatatacagcttataatatcaatttattatagacatatcaataacacttattgctcaagtatttacaagccatcaaaattaacgcatccttaaatctgtaacaaactgcgtaactgcaagctaacatactgtaatttaacgatcaagctcttatgtagactttacgtcgttccgaactcattaagcttgctaggggttttaacgaaattgcgttatgtcattctgtgtaataaaattgtcaccaccattcctgagatcactcatctatcatagcagtcaaaagcatgcagatgatccattgggatattagaaattgccaagccttccagttcatttccatacgaggcaaatgaggagaaacgagacttttcttctctaatattgatctattcaagagcaatttagtcacaagttctgatcatctgttcgtacttgaatatgtaaacattacaataaacggaaccaaaagtcaaagcatgcaaagcgaagtgaatttaaacagttcattccttattaaaagaactgcttgtccatattttttgacaagaatatgcttcttttaagatagacagcaaataggcggttttaaggttgatgcaaacataaatcatgttacagcaactacttttaaggcgtaaagtttaccttcatagttgacagtaaattatttttatctttctatttttgaaagcaaattcgtaaggagaataataatagtattataaacaccacttgatcgcagtgctgcgtctagagtgttgattaaaatatgactcaattgcttcgacacctccataggactacttttactcaataatctgtaatcatcgagtatatttaaagtaagagaatagcctccatccccgctttccaaaaacgtatacatataaagtgcatcgcatacgcttgaaattaacttttgattcagaaatcttctcgtgtctaatcctttgtcctaaaaagcctaatttcgtgtatcttatactgcgaagcaatacagaagatattttctggaaataattgactcttttcccttccaatccatatacgaggaatttttgacattaaattccacttttagaaccattctattctttctctttccttgctaccaccatccatttctagtcattcagttcaggttttttagtaaaccttcttgttaattggttataacatcgctctttcattgcttaaaagagtaactttttaaatcaccgtaccttccttgcaaagttaacctgtatacatccttctgtgaacccgcaacagaccattttatttttttaaataaagcatagtctcaagttccctaacatttgattaaataccgattgccgattaaagcattccgacatttttgttttcatcagattattcaagtaacgagttaagtattttttacctcgttcacacattgactgcctttttcttttttgcattacttttttgacaatctcgataatcttttattaatccagccttcattttcaattcctttttttttttgaaattcaaattctcgttgactcctcacatcgacgacataagcaaattccgttctctcactaggcctattgaccgatttgagcattttaaacaagcattgtttgtctatctcttttttgacttctgcatacctcagtcttgttaccttgaacgttatattttctctgtttttttatcgaggtaaacaaacaaaaaaaaacatattttatagtatccaatcaaaaaaaaccactttttttaatttttcatctacaaacaataaataactttcaaacgaaagaatttactgtttaatattctgttgattccttaacttcttggaggatctatttataaaactgctgcctgcgacgattcaaatcgaggtgttcccaatcaatttgtaaaacaggtgttttctttaatacttttggttctattttgcattttctgtttctagtaccgccacgttcatttattaattatccctaattgaataatgagtcaactttatgctttaaacggacaacctctagcagggaaatctgatgacctggcaaataaacttgccgccttcggattgtctcaacctaaccatagttctctttcagaacaacaatcgaccaactctttgcttcatggttcaggagcatttaataaacccccactgtccaggaattcaacgacaaatccgcttaatttattatatacacaaacacagcaacctgcaaggtcgacaactccttttctgcttaacccagtaggatcaagtcctggtaaattgcccgtgccttcaaggaacaactcttacttacagggcactgcggagtcaaactccggtaattttgcaaataattcaattagcaataattgctggaattccgcatacaattctaacagtttcgaaggcacaggcagctctccaaattttccaccccaaaatcaatttctttcagatagtcgatcttcaattgcaacgctaaatgccatcccttcgttggatcaaagtgttctattgaatccaaatcttcgggctagaacacctagcttggtaccggaacattactttgatgataccgacaaatcagtacattctaaaagtagttctggatctaactcccttagtgaagcttcaaatgatgatttagaatcttctatcattcaaattgttggtggcttgccggacgattttgatgatagagagctgagtggaattttcacattctgcgaaggatatgatttttcaaaaatcgaaagtgaaaatgggcaccgaaaagctattgtatactttcggaacgcaatagctgcattaaaggcaaaaaacatgttaaacgcgtcttctacaaacaatttcaccattattcaaagggatgttgtaaggcaacaagaaaatgaatatcacaagggcattccaccattgactaccccaagtttatattcccaacgcctgtcaaataactatgactcaacaacgcctgggtttcctcggttttcaccagcaaattttgattctgtcatcaataaggacgttacttcagaatcacgaatgtccacctcgtatccagcggtattggaagcttttaaatcgttcaacccaataaaggctcctaaagctgaatatcttaatcaatcacgagcatcaatgggaaacccttcaccttcaaactggaataataggctattacagccatcttctaaagagcaagccgtatattctttccaaacgcagaaaaatagcaaagggcttcaatttacaagcaatgaattaacaaaccccacagccaaatattcacagttgccaaacaatattgctaatattggtgaatctaattctttatcaaatcagccgaataactttgcacaaacgtcgttcgattaccaacctaatcatccaaatgcaatttcgcccaaagcaaagttttctttaccttcaagaccaagttatcataaagacaactcttttatttcaaaacaagctatcgataaatcaaatccttttgaagaggcattgcgattagaacgtacgagccctgttaaagagctacctgctataagaccacgtacaattccactgaatggtgttgccccatatgaaagtgaacttaggccgccgcccaagtggaagcctatgccagaccttaaagtagtccgttcacgcccgtcattaaaacaacgccctttaaggagcgccgaatatgtccgtgtttgtgaattaaaatgccttcaggaagaagaatttgataataaagtgctattggaacaagtagagtccaatgtgcaaactgatcataactcaccctgtaacacaatttatgtgggaaatttgtccaacccagaccaagagaaaaagcttaggttggctttttcaaaagagaaggggtatcggagactatgtttcaaaattaagggaaacagtcctatgtgttttgtagaatttgaggaagtttgccatgctgcgaaagcaatggaaaaaatgcaaggtgctgcattagacgataaaattaaaggtggcattcgcttaagctattccaaaaatccacttggtgtccgctccaccgaaaacctttcaaccacagcatccctttttcaacaacacggccctccgaagaaaagcacggactgctactcagcaaaggcatccgctgctgttgaacgaaaataccattttcaaaatatgactccaaaaccaaatggaaccaacagtgtcaccacactaaacaggacccaaactcactcgtcggaagtgaacgatttgtttgatatttttgagtttcctagcaaatagaaacggtgagtttttcttcaatagtcaacactattgaaaagagcacgctaaggctatgtaaagaaaatgactctatttctatacaaagtcaaaacgtttgatttttagttttaacattcagaatcagttgcatgacagaattattttatcctttgtgaaaaattccacaattattgagaaaaaaaataaaaaaataataataactagcataattaataaaaaatttggttgaatttggtaagcaattattgaaattcaaagtaacatgctgtcagccttcactaagctagattggaaaaaacttgatctcacactttggttgcaaaatgtagaataaaatttataacgcaataaaatttaacgacgtcttccatttaaagtcgaattaacgatttatgtttgttagttcgtcatggtttaaaagttcggaaagagttttgaatgacaaatgcttccgttttttagaaacaccgagggtcattattttgtttgataagatttgtgtagaagtagtgtaaataccataatatgagcaaatcaaatgcatccaatatcgagcgaaggctgttgctttcggattgctaggacaatcaattaacatataaattcgatagcttctctgcgtttccaaaaaagaagacgtatcaatttctgctttaatattaaagctttccgaagcatatatcgctggtgaatggtcgtggtcataagcataaagcttttcgttcataatattattcaagcactcgtccaacaacaacactagttgcagagagttgtaacatttgatttcatgtctaatccttttaacaatggatttatggtgattgtcgttaaacctctggttcgatgatgatgttagcaatgaagatatattatttactccatccttgtaaaactcatctccaacggttaaaaaaccaaaagctggtctgtgggtaaataaatccttataaacgacctcatcaggatcatccgctgcttgctttaatatatgcaagtctgagagtcgatattagtaaatagtttcaaaaatgcgaacagcgacccaaaacataccattaaggaaacgattctttttcctcgaaccgatgtttctcttggaatcaaggttccttcttttccatgaattgtcattgtcaatacttttaacaaaatctaaaacacgcgcatcggatccacagttacgagcagaaatggattggaacgactgtaggtttatccttctggttgagagagttagtggaacatgctttgagtcggcactagaataagcatccgcgcaatgcaatgtatttgaaatgagaaccatcgtggcacacgacagcaaccaaatgccgatttctctttagataatagaaaggaacttgcggaatcgttacacttcaataaactaatttctcgagccctaacgaatcacttgtgatgaatagtgaggcacggttcaactcattaaatgatcactgtacatgaaaaaggctgaatgaaaacatgagtttttaggatgttagtatagcttagatgaaaacgaatagaggtttatacactctatcttgacttacaaaagccaatttataaaaatttctaatttttattcaaaatatatatacatagatatatagttctatgggaaataaatagaaagcaaagtataagcattttgccattgatttgagaggcaacaaaaatagtctcaacattgcaagaataggaagggacaatttaaagaccgtttagcgtttttaacgcgtaattggggataatccataaaatagacataaaagagctactccaaaagtttttacactccaagttcgatatcgcaaagagcatccacttttttaatactatcctggacgtgatcgtaaccaccgatgagatccaaaagaccatgtttttcaaaaatatgaagaacttgcgggtctaaagataccaaatgaacctcaacttggtgctcgacatactctttaaggatacgctgaaaggcaaaaagagcacttgaatctatggaagagacacctaccatgtcaaaaacaacgacttcaatgtcttcaatacgacgataaggagtttctccaggatgcattcttggatgtccgtacttttctaaacgatttagtcgatcttcaagctgactgacgtttgcaaaaaaaagcggttcaggaatgcgaacgactaagatgcggggggcactctcgacagcagtcgaagaaggattagttcgatgggataaagtggaagctgcatcttcaaggataaattctgctgtaccgtttgaagtaggagatctaaacatgatgcgagaacgggtggagtgtcttataatttgcatcactgttatggacaatccaaagataattccagtttccaatccaaacatcatagtgcatgttgcgatagaaaatataattcccaattcccaccacactcttatgcgggctaacttgaaaatttccacggcagcgtcggcgaacaatgatacacccaaggaaaccaccatggaagcaagcatgcaagtaggtacagtggagaacacaggcatgataaagaatgttgctaacaaaataagtacactacaagcaatagtagctacctgtgttcgagcaccagacattatgttacatttagtacgtaggtacccaccgcaaataggaagcccacaaaataaactgcttcctatattcgcagcccctaaagatatcagctcacgattggagcgtattagattatttgtctgcaacgaaatagctttcactgcaataaccgtatctatgaaagcaaggaatgaacacattactccagtttgtaaactttgggtaataaagtgaagcttatttttttcaggtaggggaagcttaggaagtagtattgtggttttaatttctcctaaaatggcaataccgtaattggaatgccagtcaaactttttgctcaaaaaagaacctaacaatagtatgataactgcgtcaggaatcgagacaattcgagggtatttagcggaaagcttggatttaagatttcgacaacctatgagcaacgatattgtaatacatgaaagtatagtggtatatatgttagctttcgacatgttccttattaaaaacataagtttatcaataggaaagtccgaacctttatatttgactccagaaaatccaaaaaatacagatccttgattgatcataataatcatagatattgacaatatgcatccacgtaacaatactggggatacaagtgcatccaaaaatcccaagcggaacagcccggcagctaaattgataattcctgcgataaaggcaatcaatccagttactaaaattgctgtttcttgaggaacatcggctttcgacaaaacgcgttggtgaatgttttcagcaataagcagacacataccagcctcgggtccgatggatatcagcgggcaagctgtaaaaagacaatataatatggggccaattgcagtacctgttaaaatgtatattggggggacacctagaaacgtttgtgcaaatgataatgcaataggcacagagagacaagcagtcgagcagccagctaacacatcccaaatgatatttcttaaggaatagttgggaagccaatgaaggacagggatataataattgattcttcgaaccaaactgggtttttgttgaggaatgttagcacgcttccatgtggaagaacgtctagctaaagattgataagaaggaatctcgtgtaagggtctactggtgctagttctgttatcgataaagctagttttagggcccaaaagatggttttctgaaggagacgacattgctacaaacagaaaccgtttgaggtgcaaaagtaatatgttacgattaaaagcttagtaatttcaaaaatctacaatactaacgttaaataaaaaccggataaatgctcaacgtgcaacgaaaccaaattgaaaattaaagaaaagcgatcaatttcgtcgagtcccacaaatgggaaatagtaagaaaaagttggagtttagaaataagtcataagatttaacttgcacttagtgaattgactgtattatcaaattggtaggtcaggtccggtcctataagccataagatataggtcctaaaatcggaggtatctccgactctaatatatgtaagattctgacgcagataagtggccgtcatcgtaactcgcttaagtaagacttaattaactcatacgttacttttagaaatagactatcgcttatagtcgaatgataatacatacagagcaagagaaaacactgaaaaacagtatgaagcagtcgaaacaagtgctttcatgaattaattaataagttattcgcatttaacttgtcagtcctaatttcatagttgcaacttttttattagagcagctgtgggcacttttacaacgtaaaatcgatgaaagatactacggagagtactctgtaaacagaaacaacagttataatcaattctatcatttaataaaataacagaatcctgttattatggggtctttctagtggcgacgcggttttagaaatgcgtttaaaaaaagatgcatgtattctcaatatttcaagatatttcaattgtgcttctactaattaaatttctttgtacttatagtaatagttgttgttcccttggcagcccaaaatcattttaatggttaaaacaacgctgtgtgtgaggaaagcgaacatcacccatatttctataataaaataattttttattacctaaagttttcggtttgcttttttttttagtttttgcaaacgtcaagtacttttcgacgctgtacatattttcgaccaactctggaattgtgtttcaccctaccacgctgaaatgatccttagtgagttgaagccattcattttacaatgaaagaagttagagtagtaatttgcggtgaccaaggcgtaggaaaatcttctttaatttcggctttgattcaagaagacaatgtgacgagcattcctaaggtagcttgctctcatagtataatttattgttctaatgcgctaggtatttccgattatatccataccctctaatccggattcaaatgacgatgtttctcttgttctcgtagacacgcaatgtgagaattcttagtttaactttttgtggatattttttcaaagctaatatgacgacgtgtagcggatagcaatgaaagagaatatttagcagcagaaataaaaaaggcaaatgtgatttgcttagtctattctgataactattcttatgaacgagttagtatcttttggttgccatactttcgatctcttggagtcaatgtaagttaatcacattcgatttagcttgttttactaatataattgaggttccaattgttctttgcgaaaataaatcagaggatctggacaactatcagggacttcatacaattgaacatgaaatgatccctttaataaatgagttcaaggagatcgaagcatgcattctatgtagtgccctcgagaaaataaacgtgaacgaggtacgtgatttgttataaataattcaatttacttgtgttgtaactaacaataaaaagttgttttacatgtgccgtgcatgtgtaatttacccaatcactcctttatgggatgcaaaagaacgtgtatgtagctacatatgaaaaattaaacctaataatcttactagacaatgagaaaagctacaattcatgctctgagtaggatcttctgtacgtatacaattcgtgtgcttcattatgtaaatttttactaactagccagttttaattgataaaaataacgatgatttactctctgttgatgaacttaattcactttccgaaaaatgcttttcgaaaaacctaagtatcgaagatgcatcagaaattttatcgaaagtcaaggaaatatgccctgagggcgtttatgaaggacagttgactttgcctgggtttttagcttataatcgtgtacaagttgaaaatggtaaacaagaaagtacatggggaatccttcgagcttttcattacacagatagccttagtctggacgattcatatttgagccctaaattcgaggtcgcaccaggacagatcgttgagctgagtccgaagggtaagcaataatttttttttattttattaatgtaaaatgcaattaggttatagatttttggtagatctcttttatcaattcgatagagataatgatggtgccttgaacaatgaggaactttcagccttgtttcgccataccccaggtcttccggaaatttgggtgagctctcagttcccaaattctactgttctcaacgaacacggatatgttacttataacggatggcttgctcagtggagtatgatcactctttttgattataaaacaacattggcttatttggcgtaccttgggtttgacactgatggacgtggtcataatacggacgctttaaaagttatgcgtaagcgagtttctcaaaatcgaaaagtttcgaaatatgatagaaatgtctttctctgcttcgttgtaggttcgaaaagttgtggaaaggtgagttatctatacatttctgtaaattcactatatctaacttaacattcatctagactgctttgctctcaagttttataaacaataacacaaatcggttaaccccaaacactgtcgttaatagtgttgaattccaaagcacacaaagatatttggtggtatgggatatatttatttaatactttttaaccttttttgtcccagctctccgaaattggtgaaactgatctagatattctggcagaaccaaagtcacttgaagcctgcgatattttgtgtcttctatacgattcatcaaaccctaatagtttttcttttatagcaaacttattggtaagacatcaatttttgtttctgtctaatctgttctctcttagaatttatacccggatcttcaaaagattccctgcgttttcgctgctaccaaggccgacctggacagacagcaacaagtaagttatataaaatttaaaaagtgtttagttaacaagttatgtcgtagagatacccagtccaaccagatgagtttactaaacagttggggttaccctcacctacccatataagtactgcagccatttggaacacctcaaaagaattttttattcaggtgagcatacataaatcatacacattttatttaacaaatcatttttagctggctgaatctgcccagtatccagcttcctctattatccgcattcctgaagaagattctaataagacaaattaccagctcgttgccgcgcttaccgctttcggtgctctactattatctgttggcggaagtctgacatggaagataataaaacaccaatattactcgaaaaaataatgcatttatgaatttagtctaataactgtgatttaccacctccctatatcaaaactattctatcctatgaaataaatcaataataaatatatattgccaagtatgctagaatcgcattatgcattattggttatttcgtaaaattagggcaaaaagcatgcgaacataacgaacgagatgtctgaccaacctatgcttttggatatttgattttcaaaagcatggtttttaaataaatgaaagatatatactacgatacgtcggtaacaaaggcttgttttttgaaaataacccttgaccacgagctgtctaaaaatccgcattaagaaaaagaatgcttaaccactgtaataaaatattttaaataagaaagccaagatatcctaaattacaaagtcgggtgtataaatatgcatctttaaaagtagcagagtccatttcttgattgctataagcaaaagcagatgaaggtggaacatggggaggtatggatgggtcagagttaataggcatgccttgcatcttggcattaattaactttaacacaatataatcccaatcttcatgatcttctctgcttacaatgtctcttctcttttcaatgcattcacgaatgtgttccaaaccgcgcctagcttcattttgaagttcgggcaaatcaaagacaccaattaaaacgcatgtcgctaaactaaagaaatgatgattcaatggtgtcataggcgtagaagacgaagaaagaatcgttgccattttcatggcaggaacaagtacagtagacggtctagcattgatgcacaactccaataaaaccttcacatgggtaaccgccaatgtcaataaattcatctgtccccaaacgacatcaacactttgacgaaaagcatcaatctcagagcgaagctgttgagtaacgattggactttgtcgatcggtaggatctggtgactggaaaacatcagaaatgtgtcccactatcaatgataagcgtacaagttgactagggaaagtgcctaaaagtttttgatcttgtatggtcagatttatgaatgtctcaggaaggaatagaggagaacatgtagacattgaatgccatctatctaaaacaaccagcacccaccacgcgcggcgacataacgcttcgtcactgtccatgtcttcattaattgactgcaaagataaatgcgattgaatatgaagtctcatgttacaggctaatccaatagcagcgcctagccacattccctgtggtaatccatttcgaccagtaatagtagtaggtccacgctgatcactttcaatagcaagtaaaatcatagtctgcagatgcaaaatccgatttgagagatcctgaacattactacatatcaagttgagcaacccaattgctttcataggagtattatgaaacacatgacctaaagtagcaaatggtggtcggttaacaagtgagtagatggcatgtaaacaggaagagcgcaggtttatgggagctttctcaagctcggactttaaccttgccttggaatgatgcaggattggtaaagttgaatgaataagcaagtaatatctatctatagcagcatcatcccattcaacattctcctgataaagttgttcaacctcacgaaatgttgcagcatctgaagcttgagtacttttggaacgcatcgaaattgactcagcatctgatgtataattccgtaaggggtgaggtggaggagcctgagtagatgcaacacgatatgaattttgcacattgtttaagctttgcagtggtctcaaagatggagaattaacgccaagagatggttcaggagtagatggattcattaacatgggatggcgagacatgccgctagggacacttgtagtgtaactgttaagagtggcaggtgagttagaagggacggtagtaacgctgctatcgaaagatgtaatagaaggaagtacattagaaaccctatcatttacggtaggattccctcgaggaggtaagtaaactggattgtttggcttgggaggggaaggaaagttactagataaggacatgacagcaggattgctgtttgaaggattagataaataactaccatccaatgtaggagcggtagaagcaagtatagggccagaatacggctgtggactaggactactaaaaaaagttggaggtcgaaaaccggcagaaggtcctaaattcgaattggtataagagcttattgagccagggcccaacatttgcgggtaaggtggcatagcctgttggttggcgggtgatagtttcataggactaggtattgaaggagctaactggggagaattttgcgcgaattgggcattatatgtcagccaagaatctggtttttgatcttgcgagattttttgatcgactcctaaaggagctggtgctgtaagagtaaccgatggtacctgtattgcgctagtagtggtattcacggaatcaactggagttatcgacggagcccttgaactgggacttgcttcgtttccggaaaatacagaaccatttacagcaggagaagatgatttagcagaaccagaggctcgcttttgtttttcatcagcatttcgattaaaccctttggcaggaccgcgttttaggggtgttcgagtaaaattgcaatcgagatgatgcttacgacaattaatacaagcgttgccaggacgaggactttgatccatatcacaacgaatttttttctgccgacaaaaatcgcaagcgcgagaaacctttttacgagattttacatccatattgggtgatgtagagtttttcttgtatttcatacgagcttttttttcaggagagctgacgacaggattaaaaccagagacaccagcggaagcatctaacaagaacggatacgaacgttcattgactgtaggtgcagatgaaacattgacagaattgatggaatgaaaaggcaaggtgttaagatccatgaaagtcaaaaaagtatcattaatctgagtaaccctgaaattaataaaatgaacgagggaacgatattttaaagattaaagttgataaaaaatgaaaaccagaaaacaatagaagattaaaatataaaccgaaagacaaaaacaaaaaaaactcacgaaacaaagaaacttcactaacaaagattcaaacgttaaaaacaattaaagagaaaatgcaaaacgcagttaaaatgatgaacttttgagacagacgtaaaaaagaaaaaggaaaagaaatctaacaaatggaaatgactaagtaagaaaatcgtcaaagaagaaacagaaaaaacaattgtgcagtagaaagaagatacatcaataggttttgtagatttccggatacaataaatttgatcttcgtatatttgagcggtttcttttttacctctttatgatgacgcttttctagatcaacaacaaaaaaagaccagcttctagaaaagaatcctaaaattcgatcaataaattaacgaacctgatttaaggggaagggaaaggaaaaaaggatatgcagccctgatgaaatgcgcagaaccgaaacaaagagcgtgtgagggaagaaaccgagatgagaaacggctagcttaacaaaataaaagacgcgcagatgcaaattataaagcgcacaaaggaatcaaagtcaaatccccaacaagcaaggctatgacaaagaagatgagcgaagcaaaaggaaaaacaagataaaagcagtaataccaaacaaaagtgattttaaaattaaagatttaataattaataggaaaagtaaggacaatgtaggagatgttccgcatcgaccaaattccctgtgcaaaaccgagagaacacgtgaacgaaaaagaagcacgagaaaaagaaatcaaataagtgaaaaaattttgttaaacaactcactcaattacaatgactattcacagatcaaaccaaaaacaaatcgttgtgttgtggagagacagtcagcaattttacccaaggaaatcgctacgctagtgtatgtaatatgatgagcttaaacgaagaaacggctgtttagaatcctatttcgttaagcgaaacaacggaaccgaacgaaacgtataaggagatgcaataaatgcggtaaattcggcgagatgaagtgagaaaaattgcgagtttggtattaaaaacaagagtgaaaaggttgaataaaagtatgaaaaccgttagtgattatagacacttgaaaagaaaaatcagatgaagtgtctctaattctgtatttaactcccagaaaatgaattgtaggtcaacgatatgatagttgaacgatggaaaacagtgaatccacacacaagcttaaaaggaatgaagatttttaaagcaaaacgtactgatgatgagacctaaagagagctgaaaaaaagggtagggagtctgaaataagtcacaacgaaaagaaaaaaaacaagacttggtgatcacaaaaagagatggcaagtttgtggaagtgacaatcgaagaatgctattcgagacgcagtaaaggtatggaaaacgtatgattaatccaaatatctacaatcttcgctgaaaggtatatgctatcttttcttttggttttctttgttgaaaagaaactaagcagaatagcgtaaaaacaaacaatgattgtaactgaggcgtgggtaagcgtacatacaagttaccgcactgaagaaagcgatggaaagatgaagaaattaaagaaaatgagaagagatgaaattaacaaacaatgaacctcgaattatgtaaacagcgtattcaaattatcggaaagagtaactgctaaccagcaatatacgctaaagactgttgaaagaaagtagggtgataaaaaatgttttaagtaattattagtcaacaagatccgtgtggaaactatcggaacacttgagacaagggtataaaagatcgagaaagacaaggtgtatgactaagataaaaaaaaattgcttagtgatgtatagaatagacaatcaacaaagcactaaactacacaggcgaaaacggtaacaacaacgtaaataatgaatttacgctcctttgaacgaactataccaaacgatagcaactatgtcagcagtccgtgaagaaccaagtaaaaacaaagtgttaacgaaactattaattaaaagattgaagttttcgcaggcgttgaaaagaagtaatactgaggcttactaagagttaccgataatctatttatatatacccaagtcaaaaactgggagtaagagaattcgcgaatttaaaaaaacggaaaatcatcgctactaaaaatccgaccctctacacgatttgattggtttgctacagcttaatgtgcatcctaacccctgatgtaatggggtagactttacaatttgattggtgttctaaaaaacggggcatgagctcatacccatgattacccacaacaaccgatgtttactccatacttcaattgcctaactacgtcattatcaagtcacaacacggtagtttcctttaaaatgttcccaagtcggctatccagaaccaatcatacgcaaaagcgaatgtcaaaaccccagaaaatagtcaggagactgcatcaagacatgattcgatgtaatctatgacgcagagcacaattttgaaatacaggagggagaagcgagtgaaaagtctcattcataacgtcacggatgcgtgtaaaaatttgtggggccgtgagttggtcatgggggtacagtttgattatgggggttatgggaatatgtaacggattgggatgtgtgttttatatgtgtatgaaatgtacatactgtataagtagtgtagatatgcttgttaaagagttaatcccaacatatgtgatcatgttaatggaggcattgcactggttttaagtcagactctagtttaactcggactttggcttagcgcggactcggactcggattcggagtaggacttggacggagaatagtatagaatgaaaaaactgcaagcacgaggttgcatatgtaatcaatttagctctactgccaaacactagtagaagatttcatcgcttttaatctgtcggccgtttgaatttgccagatgcaaatgcaagtttaaaatttgcatggtgctggtttattaattgatataggatgaagtgtacagcgtaaaggaaagttatggataattggtatgctgcttgtttttttacaaaacgatattttttagagtagtaataaatgatgtgatttttgaaattgctttaacttgtcagacatgtctttcctttttaaaataaatttttcatcagtggatttttttagagtcacttttatttcatttaacattcatttctctgtttgtagaaaaatcatgtttgaaaaggaacaaatttattttcaataaaactcttttcatacgattaatttttttttcctttacttacaatcgacttcaaattcataatcgatttcactctcgcaagcgttttcgtcagttcattcggcttgtttcatagtatcgtggctggtccaaacccatcatcaaacttaaccgactcattttgtttcatcagccactctttattccttgcatctaatgaatgtttttgcatgaaatggttttcactttgtgccacccaacttagctttaagagtgccgacctccttcgttccacttatccccctacatatatatatatatatataaaatctgcactcacggacgcattaggccgatcgattcctcctaaagtctatgtgtgcatgaggacatttttcagctggacaaatgttcctataaagtggacttagccgtatttgccatgggaaacgaatcttcttcttgtctgctttccctctttcaagaaatgattcaacccgattttcctatcgttagtttgatataacaaaatggaacgaagtgtgcaaacaaaataacttgcacttccttattttgacatttccgagatagacactactacaatgcagaacggttttgtaggttaggtcggtaggtaggaagaaagggtatatagtagatatagatgggctttgttcgtttctttagttgattgatttaaatgaaacgaacaagtccatatgatgtatggatatctgttaatatgggtttaaacaattaaatggaatttccgccatgtttttgcattactcaagctggatatagggagagaatgagtttgtacgaaatggaacaagattagtatgactatgggactggatgaacaattgcaacttgtacaataggcgtgatcgagactaggatgttgggaagaatgatattattaataatgcaacgatgaaaacaccaaagatcatcctgtttgttcgttggttcagcaaacaactggcgtaaatcgtaacattttaagaagtatcaaataaattagtatctccgatgttgcgatcgagataagcaagcacttaggctacatcgaaacaaaagtcgttagagaaagttacttgcaaaatggatagcatctcgctttcccatggtatcaaattgcatcaagtctcgactcttgctcatgtagcgttgtccgctctattttttcccctaaacacttggattttattcatttattggagcaacatttacctcgtcctcggttactattctagtgaccactactgctgttgttgctattcctagtgtttccttttttttcgttcggataggaatttcccggtgtacattttatttggcagcgttttaaaccactagaaccgttgaaccgtttccttcataacttttcatcggcctatgcaagtaaaagtcgacggattcgctacttagcatcttattgggattgcgaaatgattgtacaatggtgagcacaaattgactcattgttgtacacaaatcttcgtacttttgttactaagtgtccctttccttactatgtgcaatttccaccatcctcgcttcattttccttgcccatcctcacactcacctccaacgttaatatgtaaagtttcgtaaatgtattttatgcagctcctttatgcatttactggagtctaagctcggcttataaaggataacgtggttcttccgactccttgctttcaccgttcagcctgactgcggagctacaaggatgttattggctttgcttgcgaattgctcgtccaagcgagccaactaaacctcttgatgcctcgcctactgttcccttccctagcgttacccgagaaagtggcgcaaaccttccccatatttcctgcgtcatagaaacgaaccaatcttagaggttagaccactttatctgttctcgattcatccacgtattgtgcgatcattttgtatataaacaagagagatggcttcctgctctgctcaacacacactctcttggtaaactgttaatctagaaaaccgggaagtttccgttcttttcgttaacgttttatttatatttcaagtctctattctgttcacttggaaattatcatttatcagcgctttgttttttttggagctactgttttagaagaagttttgatcaattctttgttttaagggtatacacattatttttggaattattcagccatcatgaatttcgataacttgaagagttttgccggcaaggcctacaacgagtaccaaaagtacaacaacaatgacagcaacaataatagcagcaataacaataacaacaatagtgataataactcctatggaggaaataacaacaatgacaattcctatggaggaaataacaacaatgacaattcctatggaggaaataacaacaatgacaattcctatggaggaaataacaacaatgacaactcctatggaggaaataacaacgataacaactcctatggaggaaacaacaacgataactcctatggtggaaacaacaacaattcttcctatggcagcaatgacaactcctatggtggaaacaacgacaattcctacggtggaaacaacgacaactcctatggtggaaacaacaacgataactcctatggtggaaacaacaacgataactcctatggtggaagcaatgataactcttatggaggaaacaatgacaactcctatggaggaaacaacaacaattcttcctatggcagcaatgacaactcctatggaggaaacaacaacaacaactcctatggtggaaacaacgacaattcctacggtggaaacaatgacaactcctatggtggaagcaatgacaattcttcctatggcagcaatgacaactcctatggaggaaacaacgacaactcctatggaggaaacaacgacaactcctatggtggaaacaatgataactcctatggtggaagcaatgacaactcctacggaggtagtgggaagaagcatggtaagcaccataaggacgacaactcctatggaagcaatgataactcctacggtggaaacaacaactcttcctacggcagcaatgacaactcctgtggaggaaacaacgacaactcctatggtggaaacaatgataactcctacggtggtaacaacgacaactcctatggtggaaacaatgataactcctacggtggtaacaacaactcctatggtaattctggtaatggcagtggttatggaaacgactattaatattgtaggtaataatgatagtattccctcacaaaattttaagagtggtaaaacttttgtttcaaacgcaaattctagtaattctaatgatgggtcttcctcaaagtccttagatgtgggttcatttgttaatgcattcaaacaattaaacgtcaacgacaattcgtcgaacaataattcatctggcaatacagatagttccactatcggctatgctgctgtatttgctgcggctggcaagtttttcagtcagcattcgtgtgatttggcaagcggtaacaagagtgctcaggaaggtcaaaatcaatttttaagcatggtggaatcggaggctaagaatctcatgaataaaacaaattactctgctaatcaatcccagaatgggaattctcaaaacagcggtaatcccgttagtcaagccattgatctagcgaaatccctgtttcaaaaccgcaatctgcttacaaagctagcgcaaagcggagtccttactaatgctgcacaaggttcttcaggaggcttaagcgctgctgctgtgtcgggtcttattggttcttttatgggatcttcttcgaacaattctaattcgtctaacaacaattccaatacatccaacaacaattccaatacatccaacaacgagtccatggttagcaagctgtcttctctcagtggcatggctagtagcttccttggttcttccggtaataataacaataacaacaacagcaactctggaaactacaacaacaacaattctgggaacaataaccaacagcatcagcaaagtagttcttccttgcaaggtttagcaagcagttttttgaactcatcttctgggaacagtaataagcagaattacaacaacaacaataaccagaattatggcaataacaacaaccagaattacaataacaacaacaactcatcgcaaggtggaaattctcagggcggttctggtcttttagggcaggcggtgaatatgttcttgaaatcgtgaatatcatttttccttcgcttagtcattaattcctaaacctcttctatcccacagaaacttcaaacgctaagctattcaaattgaaagcgttcgttctcattttctttggtaaacaggttggtgagcgcattctagttcttttgatagttagaatcgtatacatataccatatacatatttatacagacgtcaaggcaagtggttactcttggttcatatttaattagtatttactatataattgagtatcgatgtttatgggtcatataggtgtcattcaacctttctaaatcgaatagtacgtagcattagaggtatgtctgtattctatagacaaattagtttgttttagtagcttttcatctaaatagttaatatctgatatatgctgaaatctacagtgtaaacaaatatccttacacaatacttataataatatgcttatcgttatagtatgttaactctctttgagaagcgcagcatgcatcctgttcacttgaaataacgatatcgcttacatccatctttttcacaggatccaatggttgggtttgggaatcagccatgtcccatctgccatcagcaaaataaaaacgagcgtgagtatcgctgtgtaggcatctatatatagaccaaatacccgctgaaagttggaataagcaatcgatacttttatctcggctgatcgcaaattaaaaaagcatactctcatttaaataggttccgttgtttgaacttttagatttttcgacaaattgctactgcttctgattttcctattatttaaatagtttacaatgtttactagaacaattaggcaacagattaggagatcttctgccctttctttagtgcgaaacaattggactcgtgaagaaattcaaaaaatttacgacacaccattgatcgatttgatttttagagccgcttccatacatagaaaattccacgaccccaagaaagttcaacaatgcactttactttctattaaaacaggtggatgtacagaagattgcaaatattgtgcgcaatcttcccgctacaataccggtgtcaaggccactaagctcatgaaaattgacgaagttttggaaaaggctaaaattgcaaaggctaaaggaagcactagattttgtatgggaagtgcctggcgtgatttgaatggtcgcaatcgcacctttaaaaatattttggaaatcatcaaagaggttcgcagcatggatatggaagtttgcgtaacccttggtatgttaaatgaacagcaagccaaggaactaaaggatgcaggcttgacggcatacaatcataatcttgatacctctcgcgaatattactcaaagattatcagcactaggacatatgatgaacggttaaatactattgacaatcttcggaaagctgggttgaaggtttgtagcggtggtattttgggtctaggggagaaaaagcatgatcgtgtaggattgattcactcgttagcaactatgccaacacatcctgaatctgtaccctttaatcttttggtcccgattcctggcacccctgtaggagacgctgtaaaagagagacttccgattcatcctttccttcgctccattgcaacagctcgtatttgcatgccaaagactatcattcgttttgcagctggacgtaacacgtgctccgagtccgagcaagcacttgctttcatggctggtgctaatgcagtttttaccggtgaaaaaatgcttactactcctgctgtttcttgggactcagacagtcagcttttttacaattggggtttggaaggaatgcaaagctttgaatatggaacttctactgagggagaagatggcactttcacccttcccccgaaagagcgccttgctcctagccctagtctttaatcgttgtaatgagtttccattcattctatttgtaaactaaagtctcttttttaaaagctaattttggttttcccagcctggttctttgatgtgattccaaaatcaaatcagactgtaatttttcttcttctaccagttacattcatttaataaagccaccgtgttgctgatatattgatactttaaatttgttgcaaggaacttccatttattgtttttccaatagaagttgggagattttgagtatttcaatatcaaatcccagacatcataagagcctcacagttagcaaaaagccgtttagaaccctttgaatttacttgtgctaatgtgctgttcattcgataaatcaaccgttaggttattattattcaaatagacgacttcagataaggttaatatgggacaaattcttattagatggtttattccctacggaacagaagtctttcgcatattaaacatagatcaatgcacgaattactctcagtttgcatattaaacaacttctgtaaattatctcactcatcacgacaacgcttgattgctaattataaatttgttactagagataaacttaagttcgctcacataaacgtggagtgagttttgagctttagctactatatattttgttatagataaaactagctaataaatagcgtgcacttgagttcgataagcgcactttgtaaccgaccaatatagttatatttccagcaaagttctacgacttccgttttatataccaactgacttttagaaaattggtcttctgaaaaacgttggtagagcgactttattgcatttttgttgccttcattttcttgaatttctgctacgatacactgtgttgtaagcgagtcgtttattgtcatttaatgaagtttaacgaattcaaagtattaattatccaagagctgtatgtcattttgtagaaaacatgaaccaaacgtaaaaaggaataattataaacgcaaaaactggtaaatgcaagattggcgcgcagcattagaggtaatttctgattattttacttctcactaagtgatttaggaatattattcgagatatctagattctgcgctagttcttgcaattgtaaatgacagtgatgatagtaataccgcacgagaaatacttgaagctttgtccatcgaaagccagtgtgattcacatgaggaacattgggataatttgaggcgtgatgagcaggaattattaaaccttaaaactctagatgaagagataaacaaaatagatgaggaggattttacctgggaactaaaggattcgagtttagaactagatcccgatgtctacaattttttgagatctatgtttagcgatctttctgctgcgcgggttcaattggttcaagcgaaatgtcaaaacgacctcgttcgctcaagcgatgaactgttaaatcatcgtgccatacaggaaagtgaacagatagagactgctgctgacgctctgattacttccaacataggtcaccgttctcgtcaaaggaaaaagaaaactaaaaaagcaactaattctagaaaacctttgagtaaatttcaatccaacactgaggaagtcaatgaagacccaattctaaagccttctctttccgtttgggaaaataatcgcctgttgattgagaagcttacatctattctcaatattccatcttcacaaattaatcatgagttttataaaaattcgagtgcttggccaataaccatcagaaatttaattcataggcaccagccgctatcaaatataacaaataatgagttgatgaagtatcaagaagaagcaactcaactggcgaaagatactggtctttcacttaaaatttgcacagacgttttgatttgtagtaacgactacaaaaacgcattatggattttatgcttaattaaggaaactcagcataatgaaatgggaaacatcaaactgagttcacaaaccgcgaagtcaaattcttcgacgcagaccaaaacatgcttaaatgatcagagtagtaagttggttgaagatgatgaagcgttgtctgctgaagattgtaaccgtcttgccgaagagtatttggaattacgaaatatgcaatattctaactcggctaaagaatatcgaagaagcaaaagtaatcatctttttggtggttctgcaatgtatcatgctcagttagggcgcgaataccacgaaaaggcacttaagtaccgatctcttgctatgcgatctcttgcacattctggaacatctcactctttggatttgcatggagctactgtccgcgaggcaaagacaatagtccgtgaacgtgttgctgcttggtgggctaaagaggcagatacttctcctaatagtattcgtccttttgttattgtcacgggtcgtggcaatcatagtataggacttgaagctcgacttttgccggcgatcgtcagattgttacagcaggatcattggaggtttgatgctgagcatggtcaaataactgtatacggtattaatcgacactctaagcttaatagcaatgcatgagcatgcgatctattaacttgcgcattgctagtctgccatattcttttggtttgttctatttatttattttcgctcttccaactgcgttaacatgttacaccaacattttttgcttaagcccttatctcgagcaaaatattatttattatcaaaagtaagtaattgtagttacttgctcgccgaggagagcacatactaaaaaaaattgattcatagggtttcaatagattcttggttaaagagattaggtaattacaataagtgtaattgatgtaggtttcatcatggaacagaaaacaatagtcgtaaagttacagaacgtttagtcgagaatatcaacattacaataaggcttttgtatttggcaagtattataaaccaaagaacaaatgtatccaaaagatagacgctttagtaatgcagaaaatcgcaatcctcatgctagaattgcattataaatgggaaaaaaggcgccacgtatttaagatacttcggaagacgcataggaggatgcgccgctgtcatacagaaaccgtgaattggtgcgagaaaatggaacagtattatttcttcctgccctttcaagggatccatcagaaagtaagtacgcaggagagtaagttccatcgggattttttaaagcagggttaggagacgtatcagaaacgccgcccaaagaggtgtaacctctatcatataaagaacagtattttgtgtttgtttcaagaagtagctaatgtttagtatattgatatagtaatatgtcaaagagaaaacttacatcccatatttcagtataagaccaatccaatattggttgtattctcataaatttaggccaacctttgtctgtcacttcaaaagctatacgatgcaagccatgcggatccagccgccgaatacctataagtatcgcttgaatgtgcttatgttccttgagaaacttgcaaaatgcttctttcatgggaagtgatattttaatgatattaaggcgatattttgactgacactcgttcacaaaatcatccatctctggaaattcatctctaggtcgaacaaaaacgaaaggaatattagaaagttttgcttgagcttgctctttgtatttttctttaagatagtatatacacaataaaaagagaactaagcagtcttttcctccattaaacgacatagcaagtctttctggtcttgtaataaacgttagaaaataatagaacttataaaaatagtgcgcgcatactgataagtttcgaaagcatattcaataaaccgcagagaaatgctaagtcgattttgtagccccactagcttctctgaaggtgctgaatgagtgaaaatgttttttatactttgatatacacgttccaactcatccattgatatattttattcaagaagcctaagtttataccaaaaaattcgcagttatcgttttactatccagatatgcacgacggctgacaagtcaacaaaaaccagtaaaataatcttgattaatattaaatcgtatataaaaaggatatatcaacaccttattgctgaagtcagaatatagtacgttgatcttaagtaggcatcagtaagtagtgaatgaatgaatgtaactcgacgcgtgatgccaatcaacccgatattttttctataccaacgttatttcgtagctgtgttcgcgaaatggtttcagtcagagaggaatggctttgaaaatctaattattatatacccatgcatttccttagcgatatcgtactacaatgatttcgtaaaaatgtagtcgtaacaaacaaatggtaaatgatctgaacatcttaagtaaatttgttacctgctaattgaattattcaattagggctatgaaacgtttgcaattaagtctgagaatcatggtttagaatactagttagttccgcgttcttgctgcttgataattacgttatatcttgtgctttcagtctcaatatttttattctaattcactaattatagttcaatattacttattctttgctatactgcttagttatcccagaattgctaactcgatgattaacttttctggtatttcacaactcgaaatatgcagatttctatattacagcgctaattttgcaaaagatgaaaagcagaagggtaagactcaataataccttgtataatcgatgaattattaactgttgtaagaactgaatctattaaaatctatttagcccctgtatgtaaagatgcaaagaaaaaaaaaaggatcctctttaaagtattgtctatatacacttgaatagtgattatgtttaatatacaaattcatgataaatagcaacggtatataggacaatagaccatgagcatcgccaccaacaatattctaggatatcgaaagtaagaattattaacaattttttattttttatgaggacaacttaaatgaaaagtatatcagtctttagcagcattattgtcaacctccgattctttattttttggtttttcttcttcaatagacaaggaaacttgattcaagacatcaggctttttactttcctcaatttcgggtttctccaattgaccgtcgatattagcggactgttgctcttccgtaacggaaacatcgcccttggtagttttttctattgtgcttacgacaggtgacgcctcggtgtctaaatctaaatggccgctaagtacagattcgtttggttcttcggttgaagattttgacgacggtacagcagcattagaatccgtttgaacattttcgcccttcatggtttctcgaagttccttattatcaccctctacagtctcactcttcatctcagtttttatgttagccttttcgtccccgtcagccaagtcagttttctccacagagttcggttgagaaccctctaagggaactcctgtattagtctcctccgcatccgtttgtttggaattattactgctgctgaccttgaactctccatcactctcgtttcccgtaatttcaggttttgtattgttgccattattttcttcgtcaagcatgtcttgcacaagacgttcgccaatttcttctctatccttaccatcagagcttaagctcatgtcaagcgcaagtttggtgttcgctaatttttgaatatattcttcaatcgtattatcggtgattaaccgaattaccgttacctcacggacttgtccaacacgatgagcacggtcttcagcctgcaaatcatcgaatggattataagagcagtcatacaatatcaccacatttgcacacgctaaattaattccaaaaccgccagcttttgttgaaagaaggaatacagtaacatcttcctctttgtgaaattgatctataatatcctgacgtacttcaacttgtgttgaaccatccaatcgaacatatgatattttcaaagtatccagcacctgttccaaaatatcgagcatctgagtaaactgactaaacaaaaggatcctgcttccttcttctttcattttaggaagtaattctttcaacactcgaattttacctgaatccatccagggatcatccttcaacgtatatgactgcagcgtagggaaactgcggcaaagtcgatgcaattcaaagtcagacataacttccatatcttcatatatatattgttcattggcatttttatattgttcctcttgcattatatccttagccatttgctttaacttctcatcgtcataaaatttgcgaaaaagtaaggcatgatttgcagctttgcgaagctgcatgagaacatgaccggccgataatgacttgccatcgctttcttcatcgttcttactacgcttgtttcgtttatcgtctctccgaagttgttgatttttttgcaaagcagcatatcgattgtaaatttccaactggttttctgataacttacaatgttcaataatctgagtcttttttggcaaatcattaagaacttggtttttccgacggcgaaggacaaacggagtcatcatagtcttggcacggctaatacgttgcttagaaagtaaggcttgttctatatccgcatctgcggttggtttagctttaaaaattacatccaaatcgtccatgtcactgtcaaacatattaggaagaatgaaagcgagcaaggaaactaattctttgagattgttttgtaaaggagtaccagtcagcagcagtctaaagttagcgttaaggttcatgagatgtttgtaacgctccgacattctatttttcaaataatgaccttcgtcgtaaacgcagacatcaaagttttgatgtttaagaaaagatcggtcctctttgttgttcgtagctaactgataagtagtaaccaaaatgtcatactttatttcgttttcttctattgcttcgcgaatatttgctcgctcttgttgacttccgtagtaaggttccacgcggaggctagggcaaaaccgggcaagttccctaagccaattttcaagcgttgaagaagggactacaactaaatgaggtccgtggtgtccttgttccagaagaagtgcaaaaaaggcgactacttggcaagtttttccaagacccatctcatcagccaaaatccctgacagtttctgttgataaagcaaatgtaaccaattaacgccaacgagttgataacttttaagctggacgtcacttgcaagagttttgggttgctctgtaacaaatttagggaaatcactgttatccgctgcctcggtaggaaccgactccatgtcaacgatgttcagttcaccattagacatttctaatttaattccccacgaggccatacctttagatatacgattaccaagaaactcgcatttggcaattagattatcaattgcataatatccttccatggtttccatacaagcattgacgattttttggcccataggatttttttcacgacgccttccacgtctaccaggtttgctaggaacgtcatcaggatgtttgatgatacaagcttcggcaagtgtctggaaaggacgatgctctaaaaggagtttcgagtgggacaaagggcaactagcagtatcagagagttccttagcagtactgctgtttataaaattgagtacagttctctctaacgccgatgtatccctgtgaactatggcttcaggctcttcttctgagtcataaaattcatcttcttcagtagtaagtttctttgatgcattgctagtttttctggtataagaaggcataagggaagcttgcgtagaatcatttggcatttgtatatatttgtcccgaatcgagcgcttttgggattgaaccgtacggttagagcttccataagtaggcatattgctagcaacgggactttgcttaaaccttttatgctcttgtattggaataccaaggtcacaactcaaatatttttgagataaaatagaaagtgctgcagtctcatcccacttagtttgagcaagtgtgttgatcacctggtgaatcggagcctggggaacaaatgagcgtatccattgaacagaacgaataatagcattaggagaagtagtggttacaggaggaagctcgacaggtggagcgggaggtgtaagcaaggtattgttgactggtggggtagtcacgggatttgcggaggaggaacgagatcgctgagtagagcgtggagcagaacgcgctgtggagcgtgcagatgagcgcgagtttgaacgaacgtagctgggtaaaacattattgacgggttgtgctggaggctgcgcgggtattgccgatgtaggattgacagcaccgataggatagccgttattataaggggaactataatgtgcattataaccaccctgaggtattggaacagtgcctggataaccagatggcataccaggcattgctgcgggaattccagcattgggcaaagacgcagtattgtaagagggcagggggttataagaagggactggctgcgatgattgtcccacgtatgaataaccaaaattgttgttgattgcagcgggagcatctctggaataagcattggacattggagtcgacgcatacgaagaagtttgcgaataatcagtattcataaattgagtgttctcagaagtattatacattccaccacccatggaattattcaccccgtacatagcggaagactgttggacagggggcgtaccatagctttgaggatttccgtatgaagaaggcaaacctgtttgcgaagaaccataaacttccgattgaggattttcgtcggaaaactttcgtttcccgttgtccgataagtaatttgaattgtaaggaagcatctaatttaaaatcacattaagtcttctgtatttatatatcaaatatcagaagtagcacgtttggttcgtgtttggggcgtgcctgactcttacgggagtacgcagaaaaaaaataatggactctttaaatctggatatgtcttaagttaattaaaaaaatttactggattttaacggtaattatcgcaatgccgtatatactttaacctgtcaggaatagtacactacgctatgctacactacgttgcgtatcactatatgtcatatgttggaatactagctaagatccgtttattgataatcacgggtaactatccgtctatatacatagatacccgttgataacaactatttagaaatattataaatagcgttacaactgaacctcgttcctcagttcagttatgagctatattagtgataggtaacattataacccagttaatacaatacctatactcagttgctacttatacaacctgtgtattgtaatataatagaccacaaggaaaactcaccgcagttctacgtatccttaaatcagataccaaactgcgtagcttacataacctaggcttgatcttatcgttatattaaatgctttttattacctcaaaaatctacttcaacagtttgatttcaagctaaaatggtaaattttaatgcataaaatatacccattgagtaatctatttgctcttttttttataccgctcgtccgctgatgaaaacgtcaacatagcaatgcttgtatcaagtgaagatggatggtgtgaaatcacttgttataacagaggagtaattgagtattgcttttttgatcaccactgtttgatacacccttgcctgctaaacaattcaatgtgagtttgtaaattgcagttttatttatgatcatcgaccaagccctaacatacatttgttactcgatttaatttaattaatttaatatttcaacaaggaactatgaatttggagactttgtcgcccaggtattttattatatgtaaacacaaattaagcaggtcgcacgtataagtctaccgtatgttataaacaaagataataaattttaataagatgacaaataatttcagggactttcaacatacgaatatcaattgtctacttttcatgttgacaaaactttgacctcttataaagcaaggtcccaataaattaggtctccaccaccatcaacaacttgcattcgtgatttaaaatggaaaggaaatcccaagtttcagatacaaataataactctatacctacgtaagtttattaattattagtttatttctttacgccggactgcgaattggttttaagaaattccatacaaccttccacaacagtctataatcttaggtctcttatattgtttattccttttatattcttaactaaatatgttggaaatgaaaacttactaactttcgtaatagtaatgttctgcttaagtttgtgggttttagtgtcgcattatttacattaccacttataacttatttttggacgttgaagactttattcaaaggtatatactaattgttgaataattttgatttttactgataaattttgttttaggatatcaaacattgtacgcaggattatctgcagctgtaatggtcaatattatcttggccttgtatatagtcgcagcctttcgcgaagactccgggactcccaagaaggatataaaaagggaataataaattttcagtaaccattttactactattttgagttatgacttttgcatttcaattctaaatcaaattttgaagcggattttccttctgccaacgtatttaggtgaatcattcgatgtctttattttttttcgttaaaagtatcgcaaaatgaaagactttagctgggactatcctataatctactggattttgcatgtatgtctattgaataaggtgctaccacaaagctgttgctggtgatactactcctttttgtatctgaattaatgaacggaaatttttttgtttaatttttcgctagtctgtaatgaaaatatgtgtctgttctttagttttttgtagtttcccaaaaaacacgaattagcaaaatgcaattgatatggcaatttcaaccaattttataattaaattttcctttttataatataaggctaacatgtatgattcttatcaaacataacagctgtaggaattcagtattcttctaacacttatgcatcactattttctctcaccccaaacccctcgtatattggaaagttgttcaagtgagcattattgattttttcccaatataatattgataaaaatatatatctgtaaaaaagtttggtgttaattatttattttattctgttttctgctgattcaaagacttcgaacatgtcgactgccagtgaacaagctcgacttagacgtgaacgtcgactgaataaaatcaaacaaggaggtgcatctagaatcaatcaaattttgggacagaattcagatgacagtcaatccgatgttcgagctacagcttccgaggaagctgtacattctgaaactgcaacaccagtaacgccaatgtcttcaggattcatggaaaagagagatgataccttcaatgctgatcaagtggaatatcttccttcccaagattaccataatttggaaagttcgccttttaaacttcagtgtgattctccatataatgtaccacctgaaaacatgtttaatcaaaaccctgattttgcaaatttttttcaagctatgttacaatccgcaaaggagggatctgatacaaattttcaaggtgaaaacgaacaaattcctcaagctacagctcctttaaaaaacttagttgagaaatatgctcatcttttggcaatttctatagtagtgattgtttgttattttaaacatttggtaagtcctcatcttccttttttgaaattgtttttttgcatactaatatatttatttcagccattacttccgtggacatttactgtcgaagcttgcttgttctctattcaatttgttttggaccgtaataatggaccttcttattctcttctagcatctctggcctctcagcttccccctccctatggagcaatgatccgtcatacaacaagttatgttccgtatttcacacaattgattacagatgcgtgtatgacaatatttgcgttaggtttatgttgctatttttatccgtcgttggtgtattaatagttgttaattttcagcatttactatttatgaatcttggttttgcttcgcaaattggtgatcgattaattagcattcaatttttgtttagatgaaataaactaactgattaagcgagaaagacttttcaaacccttaggaattcaattttatattatcttttcaacatctaaacgatttatattctaaaacatactgcacttcatttgaactgctttgcaacacatgccatatttacgattgtcggtacgttttatttattttctcttttaattcaatggtagcaatagtatatgatttaaaaagctctgtttattgtaattgtagtattaattaaaaacagactacttaaagtaatttctgggatagctgtgaaaacattataactatgatttttaaaatcttttatcaacttattattgaaataaaataagtaattgagaattggcttggttgactgtatatatgtaaaacaacttcgtccgaagcgctacaacagcatgcaaacgttgaaacggcgaattcttgttatagagaaatttttcatataaaaccatacgtacatattttgctatttaagttccagattgcttaaaagaaaattgaagtggtagcaccatttttataaatatatgcaatggaaatgaaaaggcgcgttcgcgcggtgcgtcgagaccaaattcaaaaaagatggcgtccattagaggataagcagcgccaagaaataataattatttttaggacgtgttcaaggtaagtaattgagaatcatgttattgctaaaagtgcttgtgctttttagcgcttacttgtgtactgaaagggaaatcaaagtttgctgttgatgtttacctggaaaagtcttttaagtacttttccaaatttttttagtcattatgtgtacgtatgctaactgtgctatcgtaacagattggttttgaatacaataaaatcagaaacaagaaaatctttggccgaggaatggttcatgaatatacttttaaaaatcgaagctcctctgagaaatttgcctgtaccaaggaaaagaaaagagtcaatactgttctctcaattactttcttcgaatgtaagttattaagtcttgatacgcatacatacgaaagagatatgactaacatttttagatgcaattggaacagcaattatacagtgatttggaccatattaacgtacttcaacaggaattgaaggttgaaactgctcgtttggagaatgaacagaaatcttacgaagaaatgaaacaaaacatggccataaataattcacggcttgccgatttaaaatctaaagtaagtttaaaacacgaacaggcgaatgttttattcaagacttcatcttaacatatgacacaaaatgagttttccattgtttcagttatgtaaataatcaagcaatcactaatattttcttagcttcacccttatttgaagaaaggcttaaagatatcccatgataatttttcagactccaacgatttctcgttccaaaagaaactgaatacagaagattctaatacttctaaaacctctacattggatatgtataaagaaaaattaaagccatttacgaaaactatgcaaatccatgcaaataaaactgttcaattaagtcaaactatacaaaaagctactcttcttttacaacgactaaacaatacaaaaaatataggcctaaataagtcatccaaacttaagataaagaatatctagacatagaaaagctagagcttaagacttgatgacttctacatgttaacatatagtccctggccccgaaccatgaccaacccaaaaactggattaaatcgtcctttaatataagcactcagactaattgtcccgtcttcattgaattctcacaaatagtgtgacgacaagccaacttaatggagtgcttggtagattccagcagctacggacttaattcaattaaaggactttttgctagagtttagggtagggtaagcataaaattatagtagcattatagtatcgattttgaaagtaatttcttttgctttatttaatcattaaaagatgccgtaaaggattttgtgccttgcggaattgtcaagaattgtagtattactcgtaaacggtcgtgattgttatttaacagtagtaactgccaaaaaagacttagttttttatttttaataaaagccttcaatattatttaataaatagacgcaaaatcataagcaaactgattttaaattcatttgcgcatgcagtcaataattataaaagcaaagcaatacacgggtcttagatagctagtcaaaacaatagcaatgcgtaaaaaagtattgattttgattaaaacggaaagttcatataggaagctgagtatgactttctaaatggaaaagttcttgaaccacaggatgaacaaacaacacatatagctcagagatgcaagtgcctgagacagctaagcagaaataagtccatggaaaactttgaaaaacataaaataagtgaattgaaaggaacaaataaataaggtattttgacaatggacagagaaatttgtttgaagattcttcctttttacacgaatacaattggtaccaagcagttaagatccctgcttgaattgcggtcgtactttggataattgcgaccaacaagtaatgtgaatctgtaattttgtatgcaataaagcaaggtatcaagacagcaatgtttggaatcactgttaaaaactgacagaaaagcaagtactccttatgaccccatgaacgttcaatttcaacgccatacaccgagagaatgagaatacttgaaagtagcgtaaaaacattagcatcaacaaaacttgtggtaattattgtccatggaaacaagaacaaagcatttggaaccaaatgaaaacataaaagaaagaaagttacaatagaactcctaccaaacactttgatgtagatgctgattccaaatgatattgcagaaaacaatacctctaggataagaagccttttcgtaaccgaaaacttggagaaatgattcattgataaattttaggtaaaaaaaaatagtaaagttctcgttaccgtaaaaatcatcgacgtcaacaattttggtctcaaagtaaacaataccaggatacctctaagtaaatggtgcaatccgaaataaaatttctagctgtttgcatctaaaaaatagaaactcttacgaaaactgaattggccaaagatcgcttcactggaatataagcataataagaaattgcctatatggattaatacagttagtaaattagaaaatgagaagttgagataagacactgcacctggttttttaatgccttctcaataatctcatttacagggacattcggtagcgggtaagatgataggtaggtcatggctcgaccagattataaacatccagaaaattacataactttgtagcttgccgattctaatagaagatagaaaagaagtttaaactcgctgatatatttgtttgagcacaacctggtttatcaagtaactatgatcggttcggttgaggagataaacgcattcaaagttagagtaaatagtaaagggagaaattaatttttattatatttggcagttttttgagggaaaccctgatgagaaattgctgcatatcgctctgctgggttaaaacaaagtgttgattctcttaatcgaataatgtcttaaattattagtcataattcaaatcatcttttcctttcttagaatatagtgaatgcattgtttagagcggtcttatatcagaaagaagcattcgcttgaccttgaaacatttgtaatagaaaatcacatttccttagcatgataagcggaccctgaatgttcaaattattcaaataaaatagcagtatattttagaaataaaaaaaccaaataaggctcctaccactcttgtatggaatgttgagtacagaaatagcatacgaattcatgaaagtcagaaaatacaatctggctgccaactccttaacacaaacttctaaaagtgaattttgattgaaattaaaagtcgaagagaactattagcattgccgttttaagttgttaagagaccgacttcaaagagggaaaactttactgaaattcctcggatacaaaaagtgggcactcgattatttttattttgatcaagcgctgtttaaatagtaacctacgtgcaaataatagagcaggaagatttaatccacagtttcagccatcgcacgtatctagttaaatttcggtaactaatacttccacaactactaaaaaccgtctcaatgggaattcgtcgacaatccttcaagttaaatccgtattgacaggaaaagaaagaaaatagaagactgttgaggttttaagtgaaactcgttgacagaccttaagatttgactttaatttacgtgggtagcttgaaccattatagatttagaaattgtggaggaaatggatacgaatcaagttaattatataatctggagatatttgaaagaatgcggtatgttaaatagttggtttttgtgaatcatagtcgcttcatctctcctttttttcggtttcgttaacattatcgtgttttttgttgtaggttattcgcatactaaatttgcatttgaaagggaaacaggcatccaaaatttagacaaacaatggggaagtacttgccaggttggcgctttagtcgaaattctgcagaagggtttacagtacgtggagctcgaaaagcactacgttgataatcactcctcaaacgaagaagctagcaaaacatctatagatggagaaagtcttgtaaatgaaaatccttgtaaactccctttctatctcaccgtacctcatatatgcgaaacgacactgacgaaagctgactctaccaatgggttttgcgaacacaataattctaatgatcaccaacttaaaattttacaagataaggggtctgggtcgccttcatctccggtcatgccatttaaggataaaattgagaaaagggatattgacattactatggccgatgaatcaaacgtagagaaggatccggctcgacctatagccgtgtacaacagttcacctgtcacggaaataacagaaataaaacaggttacttttactggcggcgaagacataaagtcggattttttcaaagtaattcctaccaaacaccccgttacctgtgcagattggcgtccactattacaagaaaattaccatgtttacgaattttctattggtatgacaaacgctactctggcttcagttagcatttgtgaagagcaaaatgatttcaaggcaaaaacagattattgtctgcaatcttctttcgataaccaagatatcactggcgttgcttggaatgtaaggttcaaatttttttttgaaatactaacttttagaattctggttcttttttagcctacgcattcttcagcggtgtgattgaaatttacgatagtcatggttctcaaatccttagctttcataacaacaaaggccctgttttatctttgaaatggagcggtactgatacatatctagctgctggttcggcggatggaactattacactctttgatcaactgaagcaaacacaatattcaattgacacacttgcatcttccgttttagacattgaatggattagctttgatgaatttgtaacttcggatgtggaaggctccttgcgagtatacaaggtcgatggcaaagctccggtttctacagtttctcatgcgcatgataattctattgttgctttacgatacaatctacgtatctctcttctattaactgcttctagtgataccactgttaaggtaaatttcttttgtcattctaataattactgttttctaacgttttgtatagctttggtctagaggtgatgctggtgcttttgaatgtttacatgttttttcttttagctcaccggttaattgtattgactggaatttgcgggaagggacaccaattctagcggttgcttcaaacagtatcgtttctatgtataatgctatttcccttcagcaacttgctgtattcatgaggcatacagctcctgttagtgctttgagcttcagtcataacggtcgctatcttgctactggtgatacttctgggggagtatgtatatggtcatgcaaaacagccaaactatttaaggaactgggttccgataactcagagttaattgctgttactaatgtacttccagaggagcaagttaatttcttacggtggagttttgatgataaagatttacttatcggtaaacaaaagaaggagattatttgttgttgtgattttttacatgattctctgtaattgaacctagttgatcttgtatatatccatttattacagtaggttcgttgggtcatcatctatagtcaaatatatacatatatataatcatatacgaatttttatttgaagttactaaactggtagctaatatttgtcaaaacataatatgaacaggaaacaatatggaccgcgaaattgtcaaggtccaatatctatttatcacaaataccttaattatagcgacgctttcgattgccatcttgaaagttagtaacaggtataatagatagcgtgaacgcaaattagtggcttcgtctaacataaatcaaaaggaacattactataggtaaagataaaccgtacgtagatcattaaaattcagcaacgactactttggatctcataaaattgaacttccagaaagagacgtgacttgggaaaatactgtcggttgttgcgaagtgtctatttggagtgaatcattttcatggcgtacaatatcaatcatcttctttattattgatttttccaggtcggtgcggttttgaaggactgcttcaaccaaggacaaaggtgcatcccagtatgcttctttcagcaaatgaaagtattcggagacagtttccacatcggcgtctaacattcccaatagtaatttttcaatgggctcaaacgtagatcgcaaatgttccgcagccatgtattctccaaacacccttatagctaaagcaatatcagaacgaatttgttgtatagcattatctccatcgaaacatgcattcttgttaaatatacttcgtaaataactgatggtaagcgcatttgaagcttccaataaaaagacatcgaataaaccgggaaccatatgttcgatacaatcaacgatataatccctaaaggtgtcaacaataagcttcatattgctagattgataccagtttggttgaaaaagtgaagtgagagcgggcttaacgtcgttacttataatggcgacaatctggctgacgccaatatcgctaattaatatatacccatcaacggttttgccaaatgcttctcttaaatcttcctctcgttcactggtaatcagttcaaaggtgttgagcaaagtgttatccataaagccagcacactttaaattatcattagctactgcaagtaagtactccattaatcctgggggaactgattccgggttgccagataattgctgtgaaagttcggagcgcataactgatttccattgatcctgcatagattgcataatatacataattgaacttaacacgatgccgacgacgtcagaattattagtatgagaaataatattgatttgttgagtaatcatttggaaaaagatgatagtaccttgaagaccatagtttccatcactatctagttcaggttcactttcacgtttcataaatgtgtcaacgctgctctggaacagtttatcagaccattctcgtattttttgagtaaaaagtcgggtatattctcttactaaaattccgtcttttccatcttcaagaccaggttccacctcatcgaccgaaaaaggagcattttcttcgaaaaatttccggtactctctatgaaagttgattaaatataaataaacggcagccggagtatctagtgagactgctttagttacaaggccaacaagacactcttgataaatggaagcaaatgttttagcgatattatacgagggcggggtaagatcaggtaaaacgtaaaatgcaacttttaaatcttcaaagatgaaatctaagttcaattcaccgctaccgtcctcaaggtaagaaacccatgcacgttgaaagttttcagcggcagcaccttgaaactcttcaagaacacgtagacgaaagtttcgtagctgacgggtcatcccttgcagacttagaaaaggaccatcttgggagtccggtaggctggatttagcatcgcgtatacttttcaacacttcatcagaagattcttcagcctcgacaattttgaaaatttgaacaatggtttttatatggccacttttgacgagttggaaaatgttacggcaaaaattcaaaaccaaccgatcgaaattatcagatagagtgtttaaattagaaaaagaattctctagggtaattggaagatcactttggccttcaagggatgcctggtatagggcttcttcacggaattctcgaagcttagaaagtttataatgggcgcgtaacaaatttggcatatcagagtcaagttctaaatcttcacgcaacatgtcttctattacatctgtctccttgactaaattatttaactgcgatatcatttgttttgttgcataacaatttttgtatatccgagacatgcgactgattaacggaaattcatcgaccatctcgcgtgcactctcacataaagtcaacatctaaaaaaaaatcaacattagtaaaaaagtcttttagaaaatgtcaagaaagcttaagcttcgactttactcacgttatgcaattcctgaagaagcttcactcttttcgtttgagcatcatgcagtgccaatttccccaactaaagacgtaagttagatcaattacaattatcgcattaatttaatatttgtgctaacctcaacggcttccacgtgcttttcgagctccgttttcacatgcatattaagagacgcttgctcgcgttcaaatcgctcaatatgagtagataatcgatgaaaatcctaaaatcatcaattgttagctttcgatcttaattccaagcatcctaacaaggaccacttacctcacattgtctaagaatatccgctaccctgacaaagttagagtaatcgtttcataaatggtattttgataaataatccttacttgttatagacagcatcatccgatgcggcagcggtcattttcttaaagttataagcagacctagtgcttacaaacgtttctatttactgacagattgattaatatatttacggactggttgtaaaggcaggcagctttaaagcattgcaattcatttccgtaaaacaaataattctctcgtcaaacttccttaactaatttaagaagtttgtacagcataaattttaatatcaaattcacactcgtaataaggtgtaaggaaaatattcgcattgctctatttttataatatttaaatgatagattgatagaatagtatagatctgagcaagggtttaaatgagtatttagccaaattttttgtttttgttatccaaaaatagttagcatacctttttacaaaaatttaaataattggtcctgttcgaatttacctatagtgttcaaatcgtctacgaggctcatttaagtaataatatatactttgtctcgaaatcatccttcttccctataatcccagaaatcagtatacttcttaattgacaaaaaatcaacaggaatttcttttcttttaacatccaattaataaagctcataatgtgaattaatggattacgtaaagcttcggtatctgatttcttcaaaaagtgagattttttcctgataaagtaaaaaatatatatataatagattatttgttatataatcttccaatattcatcaactgattgaggtataaacattaagagactgtagctaatctccgatttttctgctccactaataggataataagctagtaatttgaagcctttggcaagccaaccacagcctatattatttttttaaaaatgtatgtcactaaaaaaaacagttttaacatttttttgtaggaatgcatcagaaaagttgagccaaaaggctgctcagtcggtcacaagaaggtttattacctggttgaaaagccctgatttcagaaaatatttatgtagtactcagtaagtagatggaaaggtttaaagattgctatctctcgttttttttatattatttatggtttaaaagatttctttgctaataagatagcttctggggtccgttgtcgaattttggaattcctattgctgctattttggatttgaaaaaggatcccaggcttatttctgggcgcatgacaggtggtatgtgttaaaaaatagtcatatcaataacttggccatgacaatgcggttttggggaagctcttttagagattggagttagtttccttttttccgctgatcgtggttatctctgttgtcaatgcagttatcgagatgactttctgtatcgtttaaaagttgcttttttgttaatctccttagcacttattctctattccagcgtctttatgcgttatgcctgggtatgttttgaatcatcttactcctttctccaatatttgatagaacttttactaactagcgtttagatggtaagcccacgtaactatttattactcggatgccatgcctttaataccactgttcaaacggcacaaggaattcgtttcgtcaacttttggtagtatgtgtattgagactttgttattctattgtttactaacgacttatttaattagtggcaaagaaggtgcttctaaacaatctgttttcgagaacatcatgcaagcagccaaacatcctgaaagtggcactcgtcaaaagtgaaaagggtcaagtatttattctttaaaatacgagtgaacggataagtcacttgctctaacaaaattgattcgaaggaagggtataaataagcaaacctgagaaatatgtgttatcggtttattacttgctctaatataggaaaaattcatttttcctatttagtttaggatttgcaaattttgaagtccgtcattattttgttaatgtacattcttttttctttttacaaaatgtctttttctattttactggtccgagacgtcgtatccttgttttttgtggaagcacaactaaattgttttgataatatcaacaatatgttttcaggcaaaagttgtcacgtggaacgatatttttatgattgtggcttctagtattctgtacttcttaatacaaaatattaacactattatatggtagcaccatggcgtactagttttctgatttgtcggttactgaatatttattgaatatattgataacggtaaagtcactttttaaaagagcaagttcagttacacaatctagcttttactaggaaaagtagtttcaattacttttttaattaattttgtgtaatattccgatatattagatgttaggcttaaaagaaatcgaaaatactaacaattagggaggtcattagtgaaaaagaaaattaaacaaaatataaacgatcaacggtaatacgtgatcacaaaattgaaggtcaaagcatttcatcaccaaaatttttaaagttaggtgaacatgatcgggaagttcagaatagctttcacatattttacaccagaacgccaaatgcttgtaattctatttttattttatcaaaaaatgcttcattgacagagtttgtagacaccgtatctgagtatttacggatggctgtttgtaaatccgtaagcaagaattccaaacgtagcaacaataatgaaggatcctctgatgattcttcattgatatttttccaaattttttcaagatgagagatgtgctccttatgcacgatttgttgatcaatgccgttatcttttgtgttgtttaagagctcttttaaaatgttgaaatttttctcaaagtctgcacaaacaattttgtcattatccattggatctatagaagaccaatcggtctgaattttattctgattaaacatacacaaggaagttaaatcggtttgcttatataacgaatttgaagctgaagagcatgtctcggaagcactatctccaaaatatgtggaagaatcagtatcggaatcgcactttaaagaatagcgatcgcttccactttgctcattaaaataaaatctcttagagcaagtttggtcatcaaggtgagattcgaaatttagttgcttgtttacattttcggagtagttaatgtcaatagcgtgtttctcacaaaacgagacagaacccagcgtttgggaattatgtacattttgctttcctagaactgaagaagatctattggaaaagaaaatataatggagcaactgcttgaatttatgggtacgggtgtttcgaacgctagatgaattttcagaagagcttaaaaaatgtgtcagtttgcactgaacttcactcagtctgttagtgttttcgttactgaagaattccaaagaaggggtagcggaggtcaaggtgcgataggtatgtacacgttccttcctcacttgtgtagttggataatcaacgaaagtgtttttacagatcatagtgggcaaaattattgagtccgaaaaaaaataatgaataaaagtagatccgacaaaaagctggcaaaaagagttaacaaaaatattcccactttgttttattagattatgtgtatgaaaaaataatgcagaaacctcaaggatatgtatagaactgtatcaccaaaagaatcatataatagtcatgctttaagcctcttcagtctcttaaaatagacctctttcttcaatcaagcgaagaacagtaattttagcgtctgtaaactccacctactgagatttcaacttacgatctaatatttactcaacaatttgtaaagtcacttagtagtcattcgttcgtctcgggcgcaattctaaaccacttcccggaacttacgcctctttggattgtgatgaaattacacaaaactccaatcatgctgattcatggttgagacaggatgactgaatgagatgacctttctgacattttcgctagttcatttgagacagtccgatgacggatggaactttgagtcaaaggaaaggtttctcatgtatctctttttcttcattaattaattacaaactcatctctttaattgccaacaattcacacgataatagcatgaaaattcaatggtcactagaaagttaatattaaaacaatcattatttgctaacaacttctgtcttcagtttgctacctgatatcgtttaacagtaattctggggtaaaaggggctgtaaggcggtgaattattttattggctcaaatttttaatcatttattataaactactttgatttgcaaatttgggccaatagtctaaagctttttcttaggagatttaacgataaggtcaatccaccaatcattttttgctaaactacgttttgagatatattaaacttgaacgtttttgcactaagtgcggggttataattgatgaattagctagttgtctggtaatgacagaatatgacagtcaacatctgaacagaaaacgattaggaggcttaaaaaagatgccatttattttgtatataaagggtaaaattcaaacactcttccttccattaataatttgaagcttacttgtaacagccacaaggatatttctcatattgatttatactaataagagaagtaccctttatccctccctatttgagtattgcagccgtttgataatcatttaaaatacgattccttcgttccgcttattttgttttctatcatttttataggaaatcctccttgaacatttttttgatttcgctggtcccgctgtatatctcttgacttttgtcttttgtgattttttgatattaaatactttcctcctcgattttcaactccgctattactgtctcttttaaattctttccctttcttccttttaatcttcaaaacaaaaatactttctctctttttctattaaaagagtgaattactattttcgtttgtttacatcccatttttctccacattattgacactgtttgtttgttttttactccaacatccgatagtgacaagccccctttttgattaatcgtcgaattttttggaacattgagcgattatccttattgtttgtttacataatttgttgactttggtgtttgtttattaaccaatttttttcctataaaagcggtcctcacctcggtacttttcttctttctctatattatatcttttgagattttctatacagactcttttaacttgggaaataaagactatcctttcattccttaaagaaaaaaagtcctttctcttcggtattcttattctctgtattcttataaggtttatatacatatagcgttgtattattaaataccaaggattctctatacttactcttctattctttccttctttctctaatattactacatcgttgcgattaatatatttataaaagcaacccggaaattttcttttttttcttttacttaatcaggactaaagaattttctcatttggtcattactttttctttttaaaaaaactagcatttattaagaacaatggcgaaaatcttaaccattgtcatgttggtcttcgtgtccatggccggatggatgttcggtgctgacacgggttccattggtggtatcactaatatgcgggactttcaatctcgatacgcagacaggtatgatcctgtcacagatacgtattcgtattcttctgctcgccaaggtcttttggttggtatggttaacactggaactactgttggatgtttactttcttcacctcttggagatcgattcggtaaacgtaagtgtatcatgggatggacattggtttacattaccggtgttatcgttcaactcaccacaattccatcttgggttcaaatgatggtagctaaaatttggactggtcttggcattggtgctttgtcagtcattgctcctggttaccaatccgaatcttctcccccccatattcgtggtgccattgtaactacttatcaattgttcattactcttggtatttttattgccgcctgtatcaacatgggtactcacaaatacaccactcatcctgaagctcaatggcgtgttcccatcggtattaacttactttggggtattctcatgttctttggaatgcttttcctccctgaatccccacgttaccttgcagttaaaggaagaaatgaagaatgtatgaaaattcttactcgtaatgctggcctcccagccgatcatcccatcatgcaaaaagaatacaatgccattcaagctgacgttgaggcagaattggctggtggtccttgctcctggcctcagatctttagcaacgaaattcgttacagaacacttttgggaatgggtgtcatggcattccaacaattgaccggtaacaattacttcttctactatggtactcaggtattccgcggtactggcttgaactcccccttcctcgcagctttgattcttgatgctgtcaactttggatgtacgtttggtgctatctttgttcttgaatactttggtcgtcgtggtcccctcatcgttggtggtgtttggcaatctatttgtttctttatttatgcttctgtaggtgatcgtgcacttacccgccccaatggtacttcgaatcatcgtgctggtgccgttatgattgtgttctcatgtcttttcattttcagttttgctcaaacttgggctcctgccgcatacgttatcgttggtgaatcgtatcccattcgttatcgttccaagtgtgctgccgtcgctactgctagcaactggttctggaactttatgatttccttcttcactccctttattagcaactcaattggtttcaagtatggttatgtgtttgcagcttgcaacttgtgtgccgctattattattttcctattcgccaaggaaaccaaaggtcttaccttggaagagattaaccaactttatttgtcgaatattaagccctggaacactggtgcttaccagcgtgatcgggaagatattaagcaaagcgactcagaaaaggagcgtggacctacttctaagttacatgaatacgttgagcatgctcccaactcgtatgcttcaacacactctacagagagtgagaattatcctcaacaagtcaccaatccggttggcttatgaaactagtgagggaattcaattcttgatggctttatgaatcaagcacactagatagaggatttcaagtcccaatatgaagacacttagattttaagtccagataaaattggatttccgccgaaaagccacctcaactttttacatttgctatttaatagcaatagcaccttgttgctttgctttgcacgagcttcctatttatgcgtaggaagtagttgcagtttccttcgttgttccctttattattaaattgtttattgttgcatttgctcattcgatcaaaatggaatgggtcgtttaaaaaaatattgttaactaactagatagtaggttataatcccagtttgcataatgaataaatgttgcatttgtttgaagtggtgtttgtgaatgaaggagtaagagaggagagaaagatatgtgaatagaaagtgtagagtaagaaaatgaaaaaatgaatgaagcgaaaagtataaaagtaaaaaattaaataaaaataaaataaattggttcattgtttatatttatagatctgtttattttttaatttttaattttttttttggaagtcataattgactactgtagagaaaattaaaaaagagattgtaaaaattaattgagattataacaaaaaaaaaatttgaaaagaaataataaattaattaatgaaattaaaaaaaaaaaaaattgaatttcaattaaaattcgatttcatatcgaaataatatatgtatacatgtaataaaataaatcaaaaattggatagagaatgacatgaaaatagtacgaattaaccaaaatataaaaatatatatatattcaagtaaaaaaaaaaaaaaaaaaaaaaagaaccaatacatattgtaccatagttatttatgtaagtatgcaaggacagaggattaataaaaaaaatatattcataaggattacggtaaaaaaaaatcatggggattggatttaaacatacataatttgcaaaaaaaaatatagggactaactttaaatgaataacatgcgtaaataatacggattggagagtgaatgaacaagtatctgcattttcgtcagcagagacaatgtaaatatgtaaatgtaatgggagaggcagattggcgtttacggcttttgtgatgcgtaaaaaaaaaaaacaaaaacaaaaacaattgaatatgggatgacaatttgcgatatcaaaaaataattgagacgagacaaaaatgaatgattgagaagagaacaagggacgagatgaaatgagaggagacgaggagaatggaatggaatgatcatggcctagctgatataacgatcgctttacctttacttcactatcgaattcattgatgatgatgatggtgtatgacaaaaatggatgatggatgattaagctatcgttaaatgcaaacaagcgatgtggaacgtaacgctaaacgagaatgtagagagtcgctaagaaaaggatcgcgtgaaatagtgaccgatttaacgagagatagcgaacgagaaaggaaaaagaaaaaggcacgcgatgctaatgagtagcacagattttgaaagaagaaaaggaaaaaaaaaatatcgcattctatcaaaaaaaatcgcttttcaaaattgaatagctttttggaatgtacttttctgtatataaatgttgaaaacaaatttttactggggctatgagccttttactcctgtgtcacaagtctcatggttcggtgttatagggtgctggaacgagtaagacgataagacgcaagcctagggaagaaaggaagaaaaaaaaaagagctgcgcaaaaaaaaaaaaaaaaaaggaaaggagtcgcatgccattgtagagaaagagagaaagagaaagagaatgtgagaaaaagaaagaaaagaaaaggagaaggagaaaagaaaaggaaaaagagaaaagaaaaagaaaagaagaataacaagatcagattaaaacgaaacgaaacaaaacgagaaaataatctttcatttgatgtttgcgaatcattagcgttaattaattaataagttgaattagtcgatacaatacaatacaaggacaatactatacatgggacaacaagacaaaaccccgagtcgcctaaaattcccactataacaaatggctcgcccaacttctctattagcaaaagctgctttgactttaccgactaagcaaaacattgactgacactcacctgtactattatcaaacaccgaaataagggtacgcactagggaaagactcatgtgatggaaagaagcaaagcaaaccacagtggcggaacggaagaaaagtggaaccttagtgagagcagcaacaaaggaaaaaaaaagtggaaaagaaaaacaaagtggggaaattgaaatgattgaggggatttttgtggaggttattgacctatttggagaggattcccatgaaagtgtccaaattgacgtgaattccatattccgataataattttcaccaatgacataaatttgcgaccaacagaatagaagcctgtgcacctaaaaaatagcctctccaccacaaaattggtcaagatttgcggagaaggtgatgggattggtggatgggcgatatactgcggggttacacggtattaggaagcctaaaatgcgaattctccacacgatagaaaaagatgaaaagaggggttgggggaggatgacgagggtgacagagaaaacaaagccggttgaatgcaaacatttgaaagacaatggatgagggtgtcaagcatgaagaaagagagagagacgggtaaaggaagaagaagcagaaaaagggtagagaaggaataaactagacgaaagaaaaggttgagcggggaggaggagaggagacgagagcgagagcgagagcgaaaaagagaatgtgtgtgaaagagagatgtgtattatgtgttttatttttgtttatgtatgtgtgtatggaaaaggtttgatgggaataaagatttatttttttttttcaataaagaaaagaaaagagaagaaaaaataaaaatgaaaataaaaacgaattactacttttcttttttctttagagtcgcataaattttcgcaatattctactaacaaagaataaaagaatctttcaatatatcggtataaccatagctgtataacaatgttaacaatgtatattgtataatgtgtaattgtaatgtataatgtaatgcaatgtaatgtatgtgtaactaggtgaatcaccatgtatccaagctgtacgtatccacgcaaagttaagattacggaaacaactttgaaatatgaggatttgtctgcatttccctctttgttctgacccatgttgacccagaattgggcgagacaagtcttcacattgttgaaacgcacaacaaacccagcaaggaagtttatttgtgtgtgtgttccacacctacccattaggttagggtagcgtgcgaagccatggtaggtaggatggtttcatagctgcatcacacattgcaaaagtagaacttgttttcaaactctagtgttgaaaggcagctaataaaatttttgtagcaaagtcaaaacgctctaggatgagcaacgcccacccaaaggcggggctttaagtttcaaaaagaaaagtgaaaatgctggatggtgcagaggttaaaagatatataggagcggtatggacgaagcatgccccacagtaatcaagtgcatacaaatcatgtagtgtgtgttgtggatcttgtggatcttatgggacacgaatgttttgaggggcagggagagagagggggaaaagaaatgagagtgagtgattgaggagaaagagaaagagagagagagaggatagagtgattaataaagattagaaaggttagacaggttagataggttagtgaagatgaagaaggaggaaagcaaagatgaaaagaggataaaaaaaaagatagtgaaaaaaaaaatattaggacgatagtttagttaaaacattgttagtacatagttagtagatagctaggatcacagggagaagcaattggaaaaaaaaagacttgagatgctgtagatagatagaggcgagtagagttggatgtgagggagacatcaagctcataagttggaggacttttgaatggactaacacctgaatgtcaattcaaattcactttgttggccattacattcacctcgttggtccattcacattctagcttcaagtggtaaacgtactgcctgatgctggagatagcttgtcatgaggaggaggaggatgatgcatacctttccaaaagtagcgtagaacgtgcagaaatcgttggacgtgtaagaattaactttgaatccattgtaccttggtcccacatcaggtggcgacaagaaggaagcgaaatgaagagaaatgaagaaaaataagaggatgggaaatgaaaggaagcgaagcgaaatgaaatgaaatcaattttaggaaaagtaaatgataagccatgacaccaagaaatcctagtaattatgattccctcttcgactcatcgattttctcatccactcttttttcatcttccttgtaccactcggcattcgattgttcgttcggtatttccttcaccattcagccgcccatagagtacatagtgctatcaaagccttgtttctttgcaatcactcccctccttacactacgatgcaatggcatagcatggcatgacagcctagacatgacaatctgggtcagtaccgttacatcccttcccatctctcactgtctcattgtctctctctctctctctcatgcctttccaagtctgttctactctgctcttgtcttgtcttgtctttctctcctctgtctcgcattcacaccccgcataccctttcatctccacagtgtagtttgtagctactttggtagagagtgtttgtctcctctctttccttctccatacttcacttgtcataatgggtgattttgggatggaacgtgtgtgtcggcctactttcccatcatcttcgcatccttggcgcttccatccatgcgtcgttacttgtccgttcggtaaaactgtcagcaaggcaattttgtggagtataacaaaagatggggtatgggagagtgttcccatttgtattgtcaaattttagctactccgacgtgcgccaatcagaatgcgtgtctccaagcgcaagagtgggcatttctgcgttcccctcttattacaccctacttcatacacttaaccccgcatccaaggtatgggcaagatgggacgtttgttggtatatattataactgcaaacccggtcttttccttcgtccaacaatcggttttatccatctctacactacattaccttccttatcatcgttaattcctttgtcaggtcttgcgtccaactttagctgtctgtgtgtatctttctcccttcagcgattgttagtaagttaattccctttcaacctttgtgttttttttaaaaactcttttttttttcacattcccatctcgattgctttattttgcttcgagtagtttgtgttttgtgcctttttcgatttgtaaggaatcgttcatcttccaaatttccattcattctctctcattccttttgtttgagtcttgtattttgcgtattcgctctccctctctatatacccttctcttaaactcatctgtcgtttctttttttttttgcctttttaattccaaacatcttttttaaaagaaaaaaaaagaaatcttataccctttttaagaaaaacaaacaagcaagcaagcaaaaatactttactagcttgttcaaaaaatttctttttcactgttgcgttataacgatagttaaacttcggtttcggttctattttgggcttttgtcttgtcattgaaagctttttgttgtcttttaaccctatttacaatcaaaccctttatatctttttttattaatttttctccttccattatattacccttttaatcgtaattttcaaaaatgggaaaaaatttgaccattgtcatgttggtcttcgtgtccatggccggatggatgtttggcgccgataccggttccattggtggtatcaccaacatgagagatttccaatctcgtttcgcagatcggtataatccggtaacagattcgtattcgtattcttcggcgcggcaaggtctaattactggtatggttaacgttggttctttctttggttgtttcctttcttcccctcttatggatcgcattggtaagcgtacctctattatgttttggactattgtttatttgattggtattattcttcaagttaccgctgtcccatcttgggtccaaatcatggttgctaagatttggactggtctttccattggcgccttgtctgtgcttgcccccggtttccaatctgaggttgctcccgccgatcttcgtggtaccattgtcaccacctatcaattggctgtcactggtggtattttcattgccgcttgtatcaacatgggtactcacaagttgcacaagactgctcaatggcgtgtatccatgggtattaacttgctttggggtatcatcaccttcatcggtatttctttccttcctgaatcccctcgttatttgatctctgttggtagagatgaagaggctcttcaaattatggccaagaacaacgatcttcctatcgaacacgaagttatccaaacggaataccatgttattaagtctgattgtgaagctgaattggctggtggtcccgctacttggcccgaaatttttggtcccgacattcgttatcgtaccttccttggtcttggtgtcatgtctcttcaacaacttaccggtgataactactacttctactatggtttcgaggtgtttgagggtactggtatgaactctccttatctttctgctttgattcttgatgccgttaactttggatgtacgtttggtggtcttttcgtcctagagttctttggtcgtcgtatgccattgattattggtgctctttggcaatccattactttcttcatttacgcagctgttggtaatcgtgctcttactcgtaagaatggtacctcaaaccatcgtgccggtgccgttatgattgtgttctcatgtcttttcattttcagttttgctcaaacttggggtcctgccgcatacgttatcgttggtgaatcgtatcccattcgttatcgttccaagtgtgctgccgtcgctaccactggtaactggttgtggggtttccttatttcctttttcactcccttcattaccaactccattggattcaagtatggttacattttcgctgcttgtaacttgtgtgctgcttgtattattttcttgtttgctcatgaaaccaaaggtcttaccttggaagagattaacgaactatatatctctggtgctaagccctggatgcctagacctaagaaccttggtaacttcaccaagcaacaagaagaggttcgtgaaaaatcccgtggtgttcaaggcgaaagtgccgctcatcttgaaaacgttgacggtgaggaaggtattgaggactctagcaatgacattagttccacaacatcttcggatggccgtgccaagcccgaatctagctaccacgatcaggaagaacaattcgcatagattgctgattgataacaacaatatttataaaaagcttaaaatgcgcttattttaagcttaatgtttgtcgtggttcgttgattcctgttgttgttttttattatatccctgaaaatttctgatgtttgttaggagtagcggtggcattttttaaagattggaactaatttattcttgtctcactcgctgcatttggaagataaatgaatgaatacccagaaaggcatacggaaagtttttgtctcatcatttcatgctttaaatttaatgttggtttggatttatttaattttcctagctttagtcgattgtggctcttaataagtgaaatgagctttggatttcttaaaagtctcttttcccttgctgtctttttacaatttattccaatggtcgttactgtattgaatatataatatgtttttccaagtttttgtttaacaaaaaaatattttttttgcatcttcttatcctatacttaccttttgtgttgtaaatttatcgtcatcgttagaggataaaaaagtttccaaaacagtataaatatatatatatacataaatacaggtaaatggtctaaatcagtatgtaagccaatttttcaagtttgttaaaaatttgaatgagtaaggtgattagaggaacggaattatgtatacataaacacacacacattatacatatattgagatatgttattgcagcttgtgcaaagttgggatgagttagcgtagtcacctttgccaatgtaatcgttgaagaagtatctatgacattttctttaaattttcaagattattttcgtttttcaaaacggtgattataagtaataaattaaaaattttaattatcgatagtagtcaataccagaaaaaattgaatccatgggtagtgatttaattaatatgcttgccaaaggtaaagataacttaattggaatccataaaaatgttaaaagtaagaatgtacactgccttctaagtttaaaccaccactctcgtctatcattttactatgaaccgcacatagtttaagatagcaacatttgaaattatgtttctacaaagatttgaataagtcattgtatagtgtacgtcaaaaaaatgttaaatgtttaaagtttccattaagttttctaaaaatggtttgacttgcttgcaaagggaaaagtgtctttccaatatctgactgtcaatgaaagaggcttcatgaagtgctcagggcaagccggaaaatttgacctaaatgcagataattttttcattcatgctttacttatttaaaaaaattgttacatatatacaaaaagatcatgcggtgtaaaaaggagatgttagtaggaaggtaaaggtatcttggataaagaagcggatgacatcaaattaacactagccatccgccaaccacaatttcaaggaaatcttagaaaactgttcgttgaaaaagttaacacgattatatagaacgggaatgtcagaagaaacatcaattcccggaatcatagcttctactccacctatttcaaaagatagtagacgtaacgtcagtcactggctacaagcgttagcggtattccttcatagtgtcagtctgacattaacggcatcttggtatacagttttatgggctttcctcccattttggcctgtaagtgagcatcttttctgatgttacaatatcaatgatttctgaaagtgaaacttcatttgcaaaatgtatcgcgattcgaattgctgaaaaaaggcgttaggtatctcatgtttgttcgatgatactaagtacttttcggttttcggactacaaaaataatccgtctcgcttccctttctcaaatgttgaaaactgatccatctatttttttttacagtccattttactaatccttcattcctttagtttttaattgtttatttgatttggttaatatatgacgatgggtttgtaacaggaaaagatcggcaaaaacgttggctgcgcaatgctcccccttatcgttggttttgtcattacttccccattcgtctgcataaaactactgagcttgactctgaaaaaaattacatatttggatatcatccacacggaattatttcgcttggtgcattcggtggttttgcttcggagggtatgttatgatggagaacccggaaattagaggctactctacatcagtgttttcccttttaattccacacatagttttcttatttaatttctaaccttatgctattaggggccgattttagtaaattatttcctggcatcaacgtttctgtcctgacccttaattctaacttttatgtgccggtttaccgtgactatctcatggctttaaacatcaactcagtatccaagaaatcctgtgttagcattctttcccgtaagccaggtgatagtgttttgattgttatcgggggagctcaagagtctcttttgtcccgtccaggtcaaaacaatcttgtacttaaaaagcgtttcgggttcgttaagttagcttttttaacaggatccagtttagtcccttgctttgcttttggagagtctggtaagattgaattttagtatttttagatagcttaaaaagtcgtcgaattactttgatgttgtttactttagtatcttgctaaccaacacaagacatttttgaacaggttgataacaatccgcgtactcgtatctacaaatttcaagaaattgtcaaaaaaattgcaggatttacagtcccctttttctatggtcgtggactattaaacaaaacttttgggttgatgccttggcgtaaacctattaacatcgttgttggagagcccatcgatgttcctaaaaagtctcaccccacaaatcaagaaatctatgaggttcatgaagagtacatccgaagacttgaaggcttatggaacaaatacaaagatgtgtttttaccaaatcgtattagcgaattgaagttgtcagcctaaattaatatgaagaagtcttcacataaaataagagcagtttcttattggcctatgcaatatgttgtgagattttatatcattaacgatttcttcttttccttctttagagcagtttataagctatatttattttgcaaaaatttacaatataatgtttgaggcactttagacttgtttatttctgttcccttcttcaattaaatgtaaaggcggttgctttcatgcaatcgtcttatcatgctaagtaaaaatcatgcagcaagccatgagacgataatttcgtttgtgactaaaagacgacgcagcagtatgcaatagtatataaattagatggcatacttggcggggagtattaaatcgaaggcatgggctttgccgcctttattaaataattcagtaagtcttagcgatcgtttacatttgatgagttgacagggtttgtaaattcaaacaaagagtaaaagttacagccctttgaggtatctgatcaggtttaatattggtacactgcatgctataaaggataaatggaaattatctttgtcttactgattcataggtattcacaattacttcaagcgttactaatattcattcagtaattagaagaaacgatttttattggaggcattttcacaaatggttcgaaggttcagacctgcaataagtttaattaattcaagcaaccatgtacgcccaatgtttcctattgtctaattggaaattaaagtgagtgttttttaacggaatttcaagtcgtgctttactaacaaaattccttatatgaggaacgaggaatttactatataagcatttttaaattgttcgcagattcggttctaaaaaaaaaagaggccatttcttcttagctattgcttttctagtattaacccaattactgtagtttcgaaaacgagcaaaaaggtctataaaacaagtgtagggagtcgatctcagactgcaaatcgctaaatttcaaaatttgataagggtagagtcttgtgagaaggaaaatagaattgtcgaatatttcaatagcatccttaaaccaaagttaaaaaaaagtatatatatcaaactaaaagcgtacctgctaattgcttgaagcattcgatgttcaactcataagctttatggacacactctacgatggttaagcatgtgatcttcatacgacgctttgcttcccgcaaaatcaatataactattaaaagatgtatagagtgatgggtgtagtactctaaacatactggaatagattatatgtgaactaaggaacattcgaatagatcatcttcatagcaaaatattcatttggcagttaattaaaatgtttatgaaattacaagatgatcaatagtaattatgctcaagaataggctcaaagatgaagaggtgcataatatagtgtaaagcactatgactcttgtgttcgaatttcattaacaatactaccctatgtacgttacgttgtcaccgatagatgtaatgtttgcaaatccgttgtattcaagtcaccaaggcaaactatttactacatgtgtcaaaacaaacaatataaaaatattataaatagagctcctactgaactgaggaacgaagttcagtcatatgctatattagggataggtatgttatactcagttgctactcatactacctgcgtatcgcaatataatagatcacaaggaaacccaacacagttctatgtattgttaaaacaaataccaaactgcgtagctgacatgttattgcgataacatttcgtctatctaagtcacaatattttattatgctgttcattattttgtaaacattgaaatttgtttgaattgaaccagtaaacagaagaaaaaatgatgattaagcttgattcattaagaatcaggatgaaagagaaatgaatgcaataaacgacaatgaaattgtgaatacaacaaggaggaacagcgagttttccaatttcattagttgatgataacagtcaattagtgaactgctattttaaaacgaataaataaaaccattattttaatattcaattcccagtgtatgttatccaacatcgcagaatctttcaagcaatgcacttgctcatccatttcgtcaggaaatgaaatcatgcaataaaaatacatctgaaatactctaaacacatcatgatttgtttggtaaatcacaattatatagatgcttctttccattgcacattcttgtagagaagtttcgtgagaaaagcgcctttataaatcaatagtaaagttagcaatataattaggcttcattttcagggttcatctcacgtaacggaatagcagtgtattcattcacgtgttgtctggcatcacgatctaaaaataattagtaaacacatttaaagtacacttctttttatcatctttaccgcaagttgttgcaagtctggtcagtaaatgcgtagagcaagatcccggttccactatgttgtcagtattaattttgtttagtaaacaacaaacctgtttcagcaatgaatatgagaatgcttgatacagccatgaaagtgaaagcggatgccgagcatttccatccccattgttgatcacctaaatgtgaactcaatttgtttacaccttttaataaaaccaagcaaaaaatagaacttttacaaaaagcaaaaaacatgtttctccacttctttaaaaagtgcttgattccttttccgcaagccttgacacattgtgccaagaaaattacagttactttaactgccttggtccaaatttcatagaagtctaatgagttagtgactgaaggtaagaataaccccatcgtctcacttacaagtcaagaatattaaagccaaagtgcaaacaagacaccaaaatccaaataatgtccattccgctgcaccataatttttaaaaaaagcgtccttatactttagataacaaactgctggagcattgaatagaatgattgaagtgaatgatattagcagttttatcaacaaaggggaagaattatctgtcgacctggaaggattgttttctctatgtgtgttaggagaattgcttaaacgtgcatgatctgtttaaattaatatgattgaaagactttagttaagaaaaagcatgtatcaaagtgtgtgcattgcatggccaactgtaaacaatgaccaaagcatgcaatttgactacgatggcaagcttcaactttcaattgaataattcctttcttattatttacaattcttacctgaatatggaggcaatgtactttcctcctctgaatcatattctgggaggggtcctttttccaaatcaatttcatgatctgtcttcaattcatcttcttcatctatagaacttttcaaggaagtgtaattattcttcgtttcatcaagataattctttatttaacaaaacacatgcgcgaattaattgctatgattgcgacaaacgaaacagcaaaatcaagaatattcactctggagttcagttcccgccgttcaacataaataaatgagcaatagtcgtttcaaagcaaactgttttttcaataatagcaagtgaaaagtaaaattccaaaactcattttcaaaatgtaattgcttctgacacatttattttgtcactgcccttcttattcaccccaacttagatttccttatgcatcattaagaaactcaacataaaaccagtatatacgtttactgcgttattacatactcactattgcaatatgtctttaggttattacgataacaaatcatcgttctgagtcacaatattttattatgctattcattatttcgtaaacattgaaatttgtttgtattaaagtaaaccattaaacaaatggaaaaaatgataattaagcttgattcattaagaatcaagatgaaggagaaatgaatgcaataaacgaaaatgaaattgtgaatttaacaaggcggaacaacgagttttccgatttcattagttgattttaagttgtcgtaaacaagttaaaccattattgtttgtagcgtagagtatcattaaaaaagacacataattagactcgcatacataataaataaagacttcggtcctcaatgcacattatccaacatcgtagaatgcattggttggcaatttttggtaattgaaagaatgagttaagcttatatctcacaaacttataaggcaagagaataattaaagtatgttggtgcttatttttaaaaaacgccgcagcttctctgcgttggtgattttggtaaagaggttttccaactggagcgacaaccacattaataaagcaattagacttcgctttcaacatccatttctcccaagggaatgtcattattatcgttggcacctctaaacgcatttcctatccgcccaattgcatttcctatccctccaaatgcatttcctatccctccaaatgcatttcctaaacctcctagtcgggtaagtaaaaaatcattcatacagttggttgaatacacatacctaggaaagaagctataccattcccgataaatttgggcatccttttgagagcacctggacgttctggtatggttagagtaaattacaggaatatataacgaacccatttcgtaaaagaaaagaaaatttcctataacaaagagtgaagaggcttcaatttcgtagcctgtcgcgtcgatatgtttatcaaataaatacatcaaacctttcgttacaataacgacacaactttgtacacccagcacttgaaacaaaccaaaaagcatatgcttgagtgtccaaattggaatacaaactgtatgttagcgtttagcaagataatttcacttaccaagcaataaaatgaaaaataaagcagccgaaatactgcatgtggaacagatgagtgccttatttaagtttagtctaccatccttgacgcaaccaaagagtataaaacaaatgactacccatgcgagccagattgtaaccaccaaatctttttttgagttatacaaaccgaccgcaattacctttacacattttgccaagaaaactgcagtcacctttacacattgtgccaagaaaattacagtcacctttatacattgtgccactgcctgggtccaagtttcaaagaagcctaatgagttagtgaatggacatattaacaacttcatgcatagcttacagaaaataacaataaacactattggacatgttataccaattgtgacggagaaagctaccttgccgaatatcgacttctccaacgggtttacacaaacccatgcagtaaaaaagacaacaataactgcaagaactgatattagtagtctcagaagggaatatatatttggatgtgaatctttgaattcttgtcttctttcgacattgggatttgcaatttctgtaggtcctgtacttgaatcctcagatacagttttaatatatttccaaatttctgaaagcattaataaaataaataacttttgaaatttggttttttttttttaaaatgatgtagaaggaagaaagtgtgtgccctgttagacgaatttatgctcgtaatatgtcaagttgtaaacaaacaaatacaacaaaaacattgtaaatcaaaacaaacagacacagcaaataatccttgacacactcaattctttatcttatccaccaacaacacaacacttacctgaatatggaggcaatgtgctcccatcttctgaattgtattctgggagaggacctttttccaaatcaatttcattatcgttttttgtactcaattcatccatagacgacctcaagggataatctttattcttcatttcttagaaacaatctattattgaatgatatacacacaaatagttcaattgttgtgattgcgacaaacgaaacagcgaaatcaagaatattcactctgtagtccaattccaaccactttaaagactttttaacaaaataataaaattgttcaaacaaatttccaactaattccttcaaacaatggcataaaaaaagaagaacgaaaaaactgaacgaggcagtggattgcttctgacacatttattttgtcactgccttttttattcaccccaacttagctttccttaaatgtaagctacgcagtttggtatctgatttacggatacgtagaactgcggtgaggtttttagtaatttcaatatagcggtatgcgccctgttaactaacaatattatatttattgttataagaagtctaatagtatcgaataccaatatatctaataactaaactgaggaatcgagtcagcagttgttatcaacgggtattcataatacggtggttagcgtgtgacatataatgatacataacgtagtgagtcataaaacacgctaaacagataccaaactgcgtagctgacatgacactgaatttctatcactctttaacaactacagtggaatatacagttagaacgtacattttgcgttgctttcacgaatccccaaagttttaaaaaacaatggctataaaagtagagttactgtaggtgtcatattttattacaattggtaacctattattgtagaggtgggcttgacttgctcttcaataagcagaaagcgttgtcgttgtcactttcaaaccttggctcaactaagttgggatcattgattgattatatggctcaaataatagaaaagccttctcaaaaagatttatttattttaaatgggactgtgtaagtgaacatggagtggtatcatctttttcaggctcaaacgatgttttaaatgattttgcagaactaacacttccctgcagacgtccggggatcatcgtcttagtaaatgaccaggattgggaacttcttgaaaaggaagaatataacctcgaagaaggtgacgaagttgtattcgtctcaacgttacacggtaaaacaatatttagcattttttttataatatttaaaactaattgtatcaactaggaggttaaatggcaggtataattataagacaaaacaaacatgcacaaatatcattagtattgaatttttttttttagtcataaatccgacatgtatgctaaattttagtgtcttatgctctagagacccaaaatccaaatcacaattaaatcattcatcatgaacagaaaccatagaccaggttaaggttacttgatttctcggtataattttttcttcgttagagttgagtaattatgattcttcgtcagagtctagttgtattgtacgagttcgccgagcttgccgacgtggatagcttgcagtgaatacctcggaatagggttcaagatcaaatcctctattctggctggatgattgtgaactacggaggcctgttccattagttacaatatttccttcatcctcatctgatgagaatggatgttgcctggaatgaatattgttatgagaaggagaattatttgaggaagaattgagagaatccaaactttcattctgaatgtcagcaagctctcttcgtaactcatcgtatctttgcccatcgttataacaggtctcagatcgagataccatattcgtccctccagagtcgcgctcttcatcgaagccgttcataatatcaatctcttcactatctgtgctatccaaagcagtaataccatttccattacttccattgacaggagctacgaagtcatcgtcactttcgacaggagataattggcttgtagcacgattatctataaatccatcatcaacatcgtactcacctggaccagaaaaatcagattctaaatcagaccccacaaattcttctccttcgtcaaatctcagccaatcttgtggtactgcagttattggcgcatgtcccatattattaaatgcgcggttagtcgagatattcccaccacgggtgttatcgccatttaggctggaatcactctcagcattttctccatcccaaaaccattcacgaccagaatcttggtcatccgatatttgaaaaccgcaatgatcgcaatggtacggattttccaattcccattggcaacgagcgcatcgtaaaactccatcttcagaatcaacaaggatacttcttgggtaatgagaatcttcttgtttaaacatcccatcaaacaatacctccttttgcttctttgctggattttcattgattcccacaagtgggaagccactgtttgaggcagcaaccacattcattatttcatatacaagatatgctggtgaaggttgtgtatacagtttttggcgacaagttgggcaagattttgactcttttaaccaatttagaagacactatttattagtttcaatcctttatagaaaaaaagtaaatctagaaacttttaaagatataatcttgctctttcaatatttcactcacaatgagggaattcaatgataatgaaaagttattccagtgttaagcatcaaattttcacttacctcgtaacaatatgtatgaccgcaatgagtggtaaaaggtctttgtaaagcttctgtgcaaatgggacattccagagttttttttattttctggaacgtttcgagcaaagtttttgtatcggggatttgttttttattttctgaattactgctaatgcgagactttttgtacatttgagttgcatcactagacgcaaaagttgtgctgttggattgtggaattaatagaacctccattttctcatcgtccaagttattattataattttcttcatcgtcttcatccaaaactacttggcgatgagaactgcgtttaaccattgcgcccagacagataaattactattgaacttggtatgtgagctctaacgtttctaatccggagagaaagctttatcaaaataataagtttaaataaaatcctttaaaaaaacgaattatatgcaaattcttcaaagcaaatcaaccattgatttgtactttatatatttcttgtagatggcaaatactctgcgtattgcaatgcagcggtttacaactgcattatcaaattcttctggtattatcataaatatcatttagtgacttgtagtcagtgtaatctcgggcatatgtaaatttatttaacgttacaaaatgcgattgcgttcaacaagcatggctaatagcgttttcttgtagcttggatttttatgaggattattcacagatacgcaccgatggcatttcacgtatagttttaagtataatattttcaaccatagctttcaatgtttcactctaagtagaattgaacgtctcccgacttaactcgtaaatatcgttgattacttaccggaaacctttttttgcatcgttctaaccaggtaaataaattgaacgaatgctattcaaaaacattcaaggattaaataacatatcaacaattagatactacgcttatttactgttcagcatacctttctactcaatgtctacaattcgcaatacacaaaacgatatgtaatagcacattagaaataaggaactgtttaatttttgttaatccttaacgaaaaaactatcagcatttaactaaattatctgtttacattattattaaaattataatgcaatccctgccagttcctcatcaacgcctttccatagtaataaggaccgggccactcataaaaacattaccagttaaaaagcatgcacaccaacttaatattaatatctctaacagaaaggacggaacagtttgaataacaacgacaaaggaaatgcaaataaaaaataactctcaaagttggcacagccaaaatccaattatacaattcgattttaatgaaggatgaatcagcaaaaaacacatactcattaaaaagaaataacatttaaaaactaccgattcgtgtaaaccgaaagcattgccattttcggtcaacaaacttatgcgtagcgatcttgttcatcaacatagttagactcaggcttagcacggccttcagaagaagaggtagaagatgtaatgtcgttactcgaagtatcctccataccctcattgtcaacgttttcaagatgagcggcactttcaccttgaacaccacgagatttttcaagaacctcttgttgttgctttgcagcttgtccgagattctcgggcctaggcatccagggcttagcgccggagagatacagttcgttaatctcttccaaggtaagacctttggtttcatgggcaaacaagaaaataatacaagcagcacacaaattacaggcagcgaaaatataaccatacttgaatccaatggagtcactaatgaagggagtaaagaaagtaataaggaaaccccacaaccagttaccagtggtagcgacggcagcacacttggaacgataacgaatgggatacgattcaccaacgataacgtatgcggcaggaccccaagtttgagcaaaactgaaaatgaaaagacatgagaacacaatcataacggcaccggcacgatggtttgaggtaccattcttacgagtaagagcacgattaccaacagctgcgtaaatgaagaaagtaatggattgccaaacaccaccaataatcaatggcatacgacgaccaaagaactctaggacgaaaagaccaccaaacgtacatccaaagttaacggcatcaagaatcaaagcagaaagataaggagagttcataccagtaccctcaaacacctcgaaaccatagtagaagtagtagttatcaccggtaagttgttgaagagacatgacaccaagaccaaggaaggtacgataacgaatatccgcacctagaatgtcaccccaagtagcgggaccaccggccatttcagcttcacagtcagttttaatgacatggtattccgtttgaataatttcgtgttcacgaggaagaacgttgtttttgcacataatgtcaagagcctcttcatctttaccaatagcaatcaaataacgaggggattcaggaaggaaagaaataccgatgaacatgataataccccaaagcaagttaatacccatggatacacgccattgagcagtcttgtgcaacttgtgagtacccatgttgatacaagcggcaatgaaaataccaccagtgacagccaattgataggtggtgacaatggtaccacgaagggtagcgggagcaacctcagattggaaaccgggggcaagcacagacaaggcaccaatggcaagaccagtccaaatcttagcaaccatgatttggacccaagatgggacagcggtaacttgaagaataataccaatcaaataaacaatagtccaaaacataatggaaacacgcttgccaatgcgatccataagaggagaagacaaaatacaaccagtcatagaaccaacgttaaccataccagtaattaaaccttgtcgcgctgaagaatacgaatacgtgtcagtcaccggattataccgatctgcgaaacgagattggaaatctctcatgttggtgataccaccaatggaaccggtatcggcgccaaacatccatccggccatggacacgaagaccaacatgacaatggtcaatgtcttacccattttaagtaaattcgaatactaaaaatatagggcacaaaaaataatatgtaatgatgtgattgaaactttattaaataataaacgtttcaaaatctattttaaaaagatgagatttcacaaagctctatgttgcaaaagtgaagtatgtagtattaatgtaaagggaatgtggataatatgaaccagcgaaattaaatagaaaagaatagaggttttttaaaggattaaataaccgcaaaaggatgagggaaggggtgtatgaaaatgtgattaatggatatgctagagcgttccaaacaagaaaaacgaagacgctttaaaaaataaaagagtgggttaaaaaaaaggaaagccgaaggaactgaaaccccgtcgaacaaaagttaaattaaccgtaaaccacagattttactaagtaaaacgtacaatttggagcagaagctgtagaaggctactcaagtgagcgggctacttatatagaaaaaaaatacatgcaataatggatgtggggcgcttgcggggttgcggggagtgtccttgacagcgtagctaaatcgattcacgtaggctagacaccgtacatgcaggtctactattggtgaagagaggaagcaattatgctcagttttgcactcccaaatgcggaaccatttatgacgagaatggcatccaaggccgaggttgaataactgaaagctctgtcggctcccttaaggcaaacatctaacactaaagaagtcgaatacaaaggtattacacccacaaaataataacgaatcatagtcaaaactaccaaggaatgacccacagtagggatgatccagcactgcacagtaaaaaacttacagacgaacctctgctactttctaccaaatgtcacattgatagcaaaactgtccatattgtacttgtgacaaccatcgaacgtgaagaacggactaggtaagctgaagagggtaatgaaagggtctcgaccagtattttgatcctggcttgcgtggccggtgaaaccctatccagttggtgtacctataagcgtctaatattggaaaaagccaagtggagagggctgtaaactagtctcgtgcaaacgtgagaaaatgcggagaaaatgacgactccggcacttcctgccgttagtgggaaagataggatggtcaaattagtacggcactattccgaatgcaccataactgtccactccgccagtgaggtacattaaaaaagtagattgcaacgacgattgcaacgttggttgctatgccgttgctttacgaggtgtagtgtatgccaatgctaagaggaaatggcaagagtggagacttttgcggtaaaggtagattaaagagatctattagacgcatccttacaaaatcttatcgtagttcgtagggaggcgatataagatgaattgattttctagttgttgttgttgttgttcaactgtactgcaagccgctaaggtaggccaaggatgaaccgtgtaaagactcgtaaagatacctataaggaagagagggaagataatagttaagagagagaagagtatacaacgatagttatatcactattgagaaataacagagcgtagtaacccgagacaagtataaacaaaccagaaaatgatatgaagagatgagacgagatgatccaaaaaggaaaaaggaaaaattgtttcattatcctttatctttttttaaaaaaaatgcatttacgcgtttttaatagaatcatgttttaatggacctatccaatacttttgaaacgctctttttctttcacaatcgcgtccaccaggtttccagacaaacaatcctcatttcacgcatacgcacacgtactacacatcttaccgtgtattgccagacgtgttaaatcccttcatgataagagtaaagaccaaaagttgctttcatttacaccgtttttcatacattaatgtaaggtcaatttcaatttgacatcttctcgttataacgaacactcatcctacagcacgaattgttggacacacaatatgccatccactttcgaggatgtgagaacccgtactgtaggagggaagacctccttttatatgaaagaagatggggtacacagatggcgaatacctgggtggttaaagtttcctgcactcccctcaaaatgagggcacccactcaacgaggcataaatgacaagagactatgtagcggcatttgacaaattagcagatttcgcaccttgattttgctaattatatgcctcgttaatcggcgtttaacctttttcttggaagtttggtacttggtttcccttgggcccatgcgattgattagtagctcatcgttaattcgtctttttgggtggggaatattgcggagtctaccaatgaagcgcagtcaagggcaatacaagtaggaaaagtagtgcggtaggaatctctctattcgttgattaaggaggggaagaggggtagcgacgaaaagtggcatttgttgatttccttgagcataagagcgaaaagctaagaaaacgcttgctaagtgtgaagggtttataagcactgcagaatggagaattgattattgtgaaatttttagagaaatttcaatagctctacaaagaaatatccacccttttcgatatcaaagcaaacgtccatccctcaagaaaaaaatcgcacacattcctagactacattagacaaaacatctccacttttaccgccaattttgataatgaaaaaagcacaattcgtactgtggactgtccagattccttaattagcagagaaaaaagtggggaaacgatgggaaaagcggtttaaggtggaagaacgcagccgcgtaattcgtcttgctgcgatacaggtatagagaaggaagtaggaaggaaaggagaagaatagcaaagggaaatgaatgcaaaggtaaagttgaaagagtgtttataaggagataaaaagaaacaaaataaaattagaaaaaattgactaggagatttttagatcgaaaatattattattgctattctaattatcagcggtttgtttgtttttttttttcggcttcattttagggttgtgtgtcggcttgcggaagcacgtgtattaacggtgcgaaaaaaaaaaaacactgggaatttttaataagccctgtaaaatgtctgtatcttgaattaagacagtggtttgagacaatggtttttttcaagcatactaataaacatgagtctttatactgttcagaaatgaacctttatgctgttaacagtgaatatgttttatgtttcgaaaatacttttcgctataacactaataaaagtccataaaacgctcattatgagtcgtggattcagagaggctgcttctttcccaccatgttttgtatatttcaattgggtaaaggcaagtctgttttgaaaattgtaaaggctaaaatgaaatattctagtatggatttattaacgttggatcctttaaagttggtttcttatattttattttattttttagtttttctttaatttaattgtttttttttttgggggatatttattttgtttatttatttatttttaaattcctatcgttttatttaattgtatcaattgttaatattctttttttctaaattttattatgtatataaattcattttacaataccattcacaatttacaaaaatttacctcttacaaaaaaactgctgctcatttactagttattttaatattttttttttttttttctctttttcttactaattttaggttcactctactctcccaatgtaccgtggatttttattgcctttagctattaatttctatattttacagagtcgtacatctacaaaagttgttgcactttatgtgtaaattatcgctaaagtgaaagaataattcttgtattattttgaatgaaaatcaattttatacatacgagcaaagtagaaatgatacattattaaacggctaattatggttgttggaaagattggaagaggtagggaaaggaattgagagaaataatagaacgagattttcgcgtatttcgatggattgatcggccagcttgattcacttggaaatcggtttagcttttttagactgaaaaatcgtactacaattgaaattgagttttactttgcatgaaataggacattccaaatttcaagtcgtgttctttatggctttctccttatggcgtgaacgagcatggctaaggaaacgcaggttcaggcgtggcgaatgtgggtcggaattgtaaacatccttaaagcagaaaacggaatcaaacaaaaaacaattaaatacaggtgtgtaaaagagtaaacagaattttcatagaggaacaaaaggatgagaaggtgaaaataaggaaaatgtgaggaaataaaaagtaaaaaaaaatttaaaaaaaattttaaaccaaaacaatcaaaccgaaattagttggaggaggttgtgtatgattcttggcttggtcgggtacgagacttttccacttcattttcattaaatggatcttggcgggcaacaggctcatgaacgtcgttgttcgcactggaagagaggtcttcagaatcggaattggaatcagcgtgctccaaatatctggctgattcgccctttggacgagtctcctcgcgctccacttctttggcttctgccatttccgacaaattcttgggacgtgacatccagggtttggcgtcagagagatagagttcgttaatttcttccaaggtaagacccttggactcgtgagcaaacaagaacgttacgatggaggcacaaaggttgcacgatgcaaagatgtaaccatacttgaatccaatggagttggtgataaatggagtgaagaaggaaatcaagaaattccaaagccaattactagttgtcgcaacggcagcacacttggaacgataacgaatgggatacgattcaccaacgataacgtatgcggcaggaccccaagtttgagcaaaactgaaaatgaaaagacatgagaacacaatcataacggcaccggcacgatggtttgaggtaccattcttacgagtaagagcacgattaccaacagctgcatagatgaagaaacaaatggattgccaaacaccaccgatgatcaatggaacacgacgtccgcaatattcaagtacgaaaagaccaccaaacgtacatccaaagttaacggcatcaagaatcaatgaggccaagtaaggagattccataccggttcccttgaacacttgggtaccgtagtagaaataatagttgcaaccggtcaattggttaaaggacataatagccattcccaaaaatgttctgtatctgatttccttaccaaaaatctctggccatgtgcatggaccaccctcgacggcggcttcacagtccgacttgatttgcttgtattccgtttgaatgatgtccgaatcgggaggaagctcagcgttcttacacataacctggattgcctcatcatccttaccaatggacacaagataacgaggagattccgacaagaatgagacaccgacaagggtgatgataccccagagcaagttaataccgatggatacacgccattgagcagttttataaagtttgtgggtacccatgttgatacaagcggcaatgaaaataccagctgtaacacacaattgataggtaacgacaatggtaccacgaatatggggaggagccacttcagattggtaaccgggagcaagcacagacaaggcaccgattcctagaccggtccaaatcttagcaaccatgatttggacccaggatggaacagcggtgacttgaatgataacgccgatgaggtaaataacacagaacccaataatggaattacgcttaccaattcgatcagtagtgggagaagaaattaaacagccgaagaaagaaccaacgttgaccataccagtaattaaaccttgccgcgctgaagaatacgaatacgtgtcagtcaccggattataccgatctgcgaaacgagattgaaagtctcgcatattggtgataccaccaatggaacccgtgtcagcaccgaacatccatccggccatggacacaaacaacagcatcgtaatggtcaatgtcttactcattttgccttaggtaaagagaagaaaggaagaaggaaagaaaaaaagaccaacaacgatgttgtgaagttaaaggatattttgtttttaagactttgtaggctctgcctgaagaattcctaagtatttgaaaataggaatgtaattctcaataggaagagagaaaaagaaagtcgcgaatttaagtgagaaaagagaagaaaaaacaaatagaaaatgaaaaaaaaagagtttctttattggaattatttctttggtattgttttgttttgttttgttttgtttttttcaaaatcctattttcgttcgatcaaatgcaagacaaaaattcctagtatcttgtgaaaagatcgtaaacaaatgggtatgcgattatactgcttccacgcttacgcttttacgcttacgattgttggattggaataggcagttgaatgagagagaatgggaatcaaccaaagatacagccacaagaagcaaaaaaaaaaagaaattgcaggtgtattggtatggtgtgatatgtaccgctagtgtgaattaaccttgaaaacgaattcaacgaaaactgtgatcacaaataagaaaaacgatccttgttcagcagggtatatatatacctgtgaggttaggattgatattatacctgcgaagggtaagtttaggaaagatcagagaatgtagctcgaaagatgcctttaccttccaactttttcacactttatatatgttatggaatagagcctccaactcaaccaaatgcggggatactgcaaattcaatctaccatttctacgtagtattgtttagcttttcatatcaacctgggtcgagacacttagtgtgcaaaatagtcatcctaaacaaactttccacaacaccctttaggaagtgtaatgttgcataccaagcccaaatccattcacttcctctatgcctgttaaactcaaacgcaaatttgcctaccaacgatgcgggacaccagtccaaatggttgtgagaatttagtagggaacaagttactatacgtaagggtcgatgctgcagccccaactccccgctaactatggctgggcagaaaaagtctggggcaatagtagtagaaagttagttaatcggttgagtgggatgaatgggatttgagagaaaggttatgggtatgaaagtggtggatagagagtgaaaaaaaaaggttagaggaaaagtagaaaaatagagaaggaaagtagataagaaaaataatcaataaaggtagggcaagacagggttaaacgaaaaggtgatagtttgaacattgtttacatgaaaagaaaaaaaaaaggcgaccgttgtatgaacatttttgtcgatcgatcgatcaatcgatcaatcgattctcctacctaccaaccacccacttccaactattcctctctaccttactcccctataccttatcctttgcatcggagggttttcctcggttagtgggcaagaaaatccatggtgaccacgttatagagtggggttccttcatgatggcgtgttacatggggttttggggtatgagcctattacacccaaagcattatgctttgatacgttgtcacaaccccgctcattacttccactcggttggcaggacgaatgatcgttggctaagcgatcgtttaggtgcggagaagaaggatcgcttctgccatagtgattgcggcacctctttagtagtaacttaaaaaaaaacaaagtttcgctatgggaagatgatgaaattcgctaaagacaagtttccggaaaatccaatgattggtgatgttgaaaagcggggattgccatgcattgatgcaaatcgcctaatgcaaattttccgtccaattcaccattagctcatccaggtaagatgtctgaacacacatcggatcacctccaccaatgtttgctttaggtaaacactcccatcgaatgagaaaagggttgttgacaactaaactttgctgtgcaccggggaagttgcggggcctgtaaatttgacagtagcggaaaaacttcaaaggactgaaggtttgagaaataagcttttctccagtcatgcagaaaacgaaataaaaacgcacagtttcgccgggtttccttcgggttcctttcctttggcttttacaacattctcgtcttgacatcatcacgaaccaactctcgatccaatttaaggtaaaaacgaatgtgtgggtccaatgcgggcaacgcaaaatgactgttgcgtaggataaagttggcgcttgaaaagtatcattgtgtttactgtgagatactgtaaagcatttaaggtgatggatggtaaatgagcgcaacgaacggtgaattaaggtgaactaaggtgatggttggtaaaacgtaaacaatagatagtgaaactgtgggatactataaatcaacattacaactgcaacaagaaatgttctttggccatcattaacacaatacgtcaaatacacactaagaggacgaaaccctgttcatcctccctggggtggggggaggggggataggtaatgtcgaagaaaagaaaagaaaaaaaaaaaaaaatagcaaaaagaaaagaaaaaaaaaattttttttctttttcttaatctttttgctagtttttctttctatgtgaagggagcggacgagtgtcctttcttcaaccgtcttttctttcttcccttttgatcaatcatcataaatggatggatacacgtaccccctcgttgcatggtgaaaaaaaaaatttcctccccccaaaaggcttacacatgtgtttgtgctaagtaggtgaatttttgcaaaattttttaccccttcctctctctttcttttgttttgttgtattttcttttgtattcatttagttttattaaactcgttatttgctttgcttggcatctcttgactgcgtaaactttatttttttcatctcaatcgctaccattttttcgcaaatcaaatacaaaaattttcatccttaatcgagtttcatcgcgtacgttttggtgattgttggtcgcttaatttttttctttcacaaaattcttttatggatctagaaaagaaacctcaagacaaagtagagactgcagagattgacgtgaaagaagaccctttcttagttacttggcagtctccaaccgatcctaaaaaccctaaaaattggatctatgctcgtaaatggacccagctaatcttggtttctgcctttgctctcttgggtcccatggcttcttccatggtggctccttgtttggatcaaattgcagatcgttttcatatccaaaattctacggaaaaggcccttattttaagtatatatttgcttgtgtttgcaatttcacccatgattagcgctcctttatcggaagtttttggacgtcgtatgctattgcaagttggaaatgtgattttcataggtaagtctttcttctccttttcacttctttccagctaaccttttgtcaaagtcttcaacatggcatgcggtcttgcaaggacaaaagcgcaaatgtacatttttcgattcctcgctggttttggtagtgccactccaatgggtctcggtagtggaacgtaagtatatatattttttcccttaaaagatgaaatgactaacgttttctttattcagtatcagtgatctgttcactcctgacgagagaggaaaggccgttgcagtgatgtcccttgctcctctattgggtcctactattggccctgtcgttagcggattcattgcagaatatacaacttacaagtggatcttttggtctacaaccatcttcagtggctttatatttgccctttctctgcccttgcttgcagaaacatatcccaaaactctgctgggagaaaaagctcgaaagctcaacaagtctgaaaagacaaataagtatcatactgagtggaatctcgagcatatccctaggcttaaacttgtcactccagctttaatgagaccaatacgaatgcttttcacccaacctatcgtgatactatgttctacgtatatggctattcaatatggtaggtaaaatagttatactttcttcaatgaaacacctcaacttaccgttataggtattctctatcttgttttaactacataccccacattgtggaccgaagagtatcatgaacgaccttccatcgctggcctaaactacattgcttcggggataggccttatctttggcagtcaagcatctggtatatttattgataaaacgtttcgatacctaaaacgtagaaacaatggaaagatggcacctgaatttcgagtccccgtaattttattgggaacttttttctttccagctggcttgtttatttatggttggactgcgcagtatcacactcactggattggtccagatattggcgcagccatgtttaatataggtttgatgttaggctggcgtggtatccaaacttatttaattgattcttttatgatttatgcagcatcgtcgacagcagttgcctgttgtgttcgatcgattgctgcttttgcattccctctttttggccaggacatgtatgataccttgggatatggatggggtaactctcttttggcatttatgtatgttttttgatggatcatctctctttttatcaatttttactaacagtagataaagtgtattgggatcctccataattacatgttctttactttggtttggtggaaaacggttacgggcattatctagcatggtcatttttaaagacgatgtataggtaatcttatttattttacagatattttgtaataatacaataatacaatttaataatggttggaacactatcaactctattcaataaaaagttaaaataatgtcaaaaaaatttgtatacgattcagtaaatacacatttcttcaaacgttaagcactaagcaagagagctataatttaatttacaacgcaatgtgatacttttatattgactcaaaatgtttgaagcgtttttattttttcgatgaataaaaataatactcacatctcgttactatgtactacaaagttttgtaagaaaagaggcttaatatttatggatgatgttcgttgtcacataaaattagattattaaattgagcgtaaagctaaataagaaaaatggttttataaaaaaaaaagttgaaaaagggaaaaggcaaagcgaaaggatgtcatatatgaagtttgctcattagcttaacaaatatacaaacccgtgtattaaaaaaaatatggtggttcaaaagacttgatatggtttcctttgatttaatcccactctaaattacgcttcttgaaaaattcgagtgtggcatctggaccatggtgggaaccaaaagcataaggaagaggtgacaaatcgcctgtagtgtcaaggacatcatcaaagattttccaagaggtacgaacctcatcatcactaataaagtgtgtatgctttccattaatggcatcggcaataaccacttcataggccttatggatccatgtatcagggaaagcttcgggatacttaacgtccaaagtcacaggaacaatttgacgagagaaaccaggttgtttaatgtgtcccttgagggcaatgaattccttgggataaacacgaaggactagaacattgctgctatcaacggtagggaacatacctccttccctacgcttaaaagtgatacgagcttcaaagtaatcgcggtccaaacctttaccggcagaaatgatgatgggaatacccttccaacgaggtgcttcagagcgaagttgaagagcacagaatgtagaaacttcactgtcatcagcaacaccatccagttcacgataaccggggacctttccatttgcacttttagtgtactgtccatagacgatgtcctccttggaaacgggatgaagggatttcaagaagtcaaccttgcatttgatgatatcttcggcatcttgagactttggctcttcgatgcaaagtaaggtaagtagttgcaaaagatgattttgaacgacatcgcgaaggataccagcgccctcaaaataacctccacgtccctcacaaccaaagtcttcacgaaagtcgacacgaacactttcaatgtgttcacgattccagatgggctcgaacatggagtttgcaaagcgaattgcagtgaatccatcaatcatatcctcgccaaggaaatggtcgactttgaaagtatccttggcagaccagtgcttgctgagatcgctgagaatggcatcggcagacttgtagtcgaagccgatgggcttctcaacaataagacgagtgaccataccattgggatgagccttactcttgattagctcggaaacgggagcaaagagatgaggaggcagaaccaagtaaaagatacgtgtgcattcggaggcgggagcagtctccttttcagcaataatgctgtttagcatctcaaaagactcgggcttatcataagtaccggggacatacttgtaatgctcgacaaaggtgtttaaggccttttgagaagcaccgacagtatcgtcaatgggaatatgggcggtgacgattttgttagcggcctcttgggacaatttggaacgggcatagccgatgatttgaaagtcctcgggaataattttgcggacgtaaagggcaaacaaggccgggaaagtcattttggtagcgagatcgccggatgcaccgaaaacaatgatggatagcatttttgtttaaaaaagttggaaagaaagtggaaaaaaagtgtctgagacaaaaggcgagattagtagtgaaagtaagattgaaaatattttttcttttgggtgaaagaaaaaaaaattaaacaaatgaaatgatttaaaggaaatccaatgagattttttcaaaaggtcaatttgcgatgatagtttaaattcgaaggaaattgtcttgttatctacgagatagatatactaaattgtgttagaaaagagcaaagataaaagacagaaagaaagagaaaagaagaaaaggagagaacaggagggggaggagaggagaaaaaggtgatatttcaggtaattattattgacaattgagttgaatatcctttgatgattcactttgcgtctacccttaactagcaccattactcactacccactactcactgccctgccttaccctgcccttttttcaaaaatccccggcccaacaataagcgaaacgaaaaaattcgccaaccacctacctaaactccacacgacgaatcaaaagcgagtatgttttacaaaccaaggttgctgggggttcagaagagggaccatactcttgtatatatacaacttgaagcaatgctcgtgacatcagacacgattggaaagaccttaatgcatctatcaacctaacgtctccgcaaacatgggacaaggtgtaaacaaaacaaacccaagccaaacttccttttaagatgcgggactgcccggggtgaggcggggcgacaagctctcgaacgtgtggcccaggtatgacaaggtgtgtgagcaaactttagactttagtatttaagctttgctggttaccacgcccacaattcctaccgcttccaatgatgtgcattgcacgatgcatgaaatgctcttttacactttcggctctactacgtcaatgtagcagtagcctagccaactgggcaactgagagtaaggaccttagtggctagtcagacagaccccggaccaaggagaggggaaccgaaacgcaggtgccaatgaatatgagagttcgacgaaaagggggttactcgggtaatgcaaatcttcaaaacattcgatcatccatcaatcagcactgaagattttcctcgcataaggtttatgggaaacgagtaaagtttgaaggggggaagcgggggatctcggaaaaagtaggaattagagtagaagcatggcagagcaaggcaggcgggcgcacagcgtagcgttaaaaaaatagcgcagtaggaccaaagcacgttacagttacgcttgttataatttacacaaggagggatttgctgtgatatactttattacacactgatataggcaacataaaaccatgtacattaaaacttgggtagtgtaagagatacaaaggactttaataaatttacacttccatttcgcatctctgtcattgcacatctaagcccgttctcagaacctggaaatgcattcctcatattcttcctactagatccattctttttctcagtctccttaccttacgtatgcttctggacatgtctggcagaggaattttgcctttgtatgaagagggggagagatctcggcaataaggagatggagcatacctcgttaaaggaaaattagggcttcgttgtggcttcccaaatggttgtcttagcaaaaggaaaaaaaggtcagctagggtagaagccgaagggcacaaagttggggcaggaaatctagaagtttggagtaaaaggcgttgttttgcttattagccaaaatttacgaaattggaaattaacagagccttcttttttaacgtacgttttgcatatccctaagtcagtctagtaaaagcatgtatttactgttttgcatggcgttcctcttccatcctcttttttctctactaagctttttctcttatctcccctattccatcataacgatagtattcgtatgttaatgagttcggtacatttcgttcgagatgcggtaactgtactgaaatggacagaggagctaaaacagtctatgtacgtgaaatttgtaaagataaatttaggcttacaatttttgatattgatgcaaattattcattcctgtcaccatgttgttttcttccatgggttgtgaagaaaacccctcccttgaattcttggtcaaacacttagtgatctcctactactttcccctagtaccgcggggatatggaatttggtggttgctaaatactgaaatgcataatattaaatagtacgacgccggacgtactcctgataacgaagcgacacttgcacgcactattcagtttcaaaagtcgcagtaaacgtctatactgataaatgatgggtttgtttctcaaaaacgtttaaggaaagctaagttggggtgaataaaaaaggcagtgacagaataaatgtgtcagaagcaattcactgcctcgttcagttttttcgttcttctttttttatgccattgtttgaaggaattagttggaaatttgtttgaacgattttattattttgttaaaaagtctttaaagcgattggaattggactacaaagtgaatattcttgatttcgctgtttggtttgtcgcaatcatagcaattaattcgcgcatgtattttattaaataaagaatgattttattattatgaagaataattacacttctttgaaaagtcctctagatgaagaagatgaattgaagacagatcatgaaatcgatttggaaaaaggacccctcccagaatatgattcagaggaggaaagtacattgcctccatattcaggtaagaattgtaaataataagaaaggaattactcaatggaaagttgaaacttgccatcttgtcaaattgcatgctttggtcattgtttacagtcggccatgcaatgcacacaatttgatacatgctctttctttactaaagtatttcattatattaatttaaacagatcatgcacttgtaaataatcctcctaacacacatagagaaaaccattcttatgggacgacagataattcttcccctttgttgataatactgctaatatcattcacttcaatcattctattcaatgctccagaagtttgttatctaaagtataaggacgctttttttaaaaattatggtgcagcggaatggacattatttggattttggtgtcttgtttgcactttggctttaatattcttgacttgtaagtgagacaatggggttattcttaccttcagtcactaattcattagacttctatgaaacttggaccaaggcagttaaagtaactgtaatttccttggcgaaatgtgtaaaggtgactgcaattttcttggcacaatgtgtcaaggcttgcggaaaaggaatcaagcactttttaaagaagtgggaaaacatgcctatggctttcagtgaagtctttttatttaacatacttgtcggatcaccaagaatgaatttaagatacatttttggcgacagatggggattgaaatgttctttggctgatcacattatctttgttgtattgagcatccttgtttttattgctgaaacaggtttgttgttgactaaacacttatttatattaacaatacagtaaaacctggatcaatcagggtcaacttgatcagaaagatgggtaaatttaaaatgatatctttttaattgtgtatgctaattatcattaggttatgaggccaaacagcaagtgaatgaatacacagctgttccattgcgtgagatgaactccgaaagtgaagcctaattatattgctaactttactaattgtatgataaaggcgctttttacatgaggcttcttttcttcataagaatgtgcaataaagaagcgcctttatgattgtgatttaccaaacaaatcatgatgtgtttagagtatttcagatgtatttttattgcatgatttcatttcctgacgaaatggatgagcaagtgcattgcttgaaaggttctgtgatgttggaaacatgcaccgggcattgaaattttttatttattatgaccaagaatttactgatggtgacatatgatgaattttctaagtcaaaaacagcaatgctgtaaactgaatatcaaacaattaataaaatctaaaaacgcttactggaacttatcatatacccaatcacacttgttttttctttttaaatattcattcattcaaatcttttaattactcaatgggtcttttttttacttttagttctccattgcttactatgtactgcgaaattaataaagcgaagcaaaactccttttgacagcgtgtcaatcattatgggtagcattgttttgtgcaaacttttaactacgagttttcttataatttgttaaatttagcctaaagacagttgacgccaatgtgatttatcctttaaacagttaaagcaaagtatgtagcttaagcttgccgaaaggtattataagtattagtatatttacctaaaatatataattactttgttgcttttttttttttggaagcagtgctaaaaaatgcgaatttgttgaaaactgttaaatacatttaacatattatctaatcatctagtattatctcgaaatatcagatgcgataaaaggcggactttttgttttgattattgcacaccatgtatccggtgaatactaaaagtgcgagtttcaggatgcccttttccggtcatgtatatatattttaaatacaatgtaccgaaatttcaagtatccgttcgttaccagtccaagatttatctaacatgaggctgttcggtaattcgaaggaacaaggtatttgtcaagttggcgaaagcgatgtcgctgttagcgagatcaagaaggatgaagcgcttttacaaaaaatgggatacaaaccaaagcttcatcgtacatacgctttttttgagaactttgctagctcttttgcagcatgcgactgtatgagcaatattcgaggctctttttatatcggcctactgactggtggaccttcagcttactggatcacgtatattattgcaattcctctccaactgatctctgctgcaacaatggcagaggtatgctctgctcttcctaccgctggttctctgtacttttgggcctctgccgcaggcggcaaaaagtatggtcgtctgattggatttatagtcgcttggtgggtagtagtagcttggacatcatttgtagctgttaattgccaatctaccaccaagtttattttcggtgagttgcccgtcttcaattctgggttttccgtcagttcttctgatgtaaaatttcgtgctgttcaatgggctgttggcgaggctatactactcgtatgtgttttattaaactttattcctcccaagtggtttcgctatatttttagagtatcggttgcagtgattttgcttgactttgttttaaacatgatttggcttcccattgccgtttctaccaaatacgggtttagagatgaagcttttatgaaatccacgaattacgatcttggaaaagtaaataatggatggtcttggtgtcttacctttttctgcacagcacgcattttggtaggctatgatgctgcaggtcacgtcgctgaagaaaccaaaaatgctagcaagactgcctctcgcggtatgttttactctgcctttagcaatgctattctcagcactggtatcattgtcatgtttttatactgtcttcctccttccaatgttatgtatgaacttataaagtccaattctcaacaaccttttgttagtttttatgcgtatgctttgggtaaacgagctcatgtttttatgaatgttgtaggtattttgggaatgatttttgatacttcgttatcgatagttgcttcaagccgcttagtatttgctgttgcccgagatggcgttttaccattttccgggtggttaagaaaggtagattcacatggtcaaccgaccaatgccgttacatttattttcttgatttcagcggcacttttgtgctctaatttgcctagtgctgtagcttttacatctttactgtcagccgccgctgttcctactattatggcttacgcagctgttgcctttggtcgcctatttttatccagaaacgattttccaaaatcagaatggtctcttggtaaactgtccaagccatttcaacttatcacctttttatggaatttatttaccgccgttattttattctcgccaaaagcttatcctgtcacaggtaaaaatttcaactatgctcccgtgatatttggtgctatcacaatttttggtctcattagctggctgagtattccagcctccaggtggagcacattttatgatgccagcaaactcgacagcaatagcttcgacgatagctctagtgataagaaaagcttggaaaaggctgccagtatagctgaaggatcaattactcagattatttaatttttttccttggtatttttttctgttatttttgaatccgtttttttgtgggaatcttgggtttttggtacgtttttcttttttgttttcttgtttagttttcatcatttgaacttccttggggatcagcattcatttttttaataaatttcaaacacaaactaattttgttggttctctatttcctcaaatgtttatgtagattagagtattattccctattgcaaatttaaagtattgaatgaaccatactcattgtgatagggtgagtattaagagcataaatttattggggacaaatctattatcgtatgaatattgtaaagcaaatttaaattgttaaattcttaaacttgaacaaggaagtcgcttatttacttgtaaaaaataaagatttcctgcaatattcaagtaaatctcaaaaagctggatataataatacttacatagaaaaatacgatattttcgttgcaaaagataaagattagtgttttctattatcctacatattacagtgcgaactattaatcatcataataagaaaaagttaataaatttccaaatgcgaaatatatttactatgtataaaatattaatgaaacataaaaagaaaattaaaactcataaactcgtcaacgacaaaacgaaaatgataacaagccttctgaactattggtagaacacatcgtttaatcagaacttatctaatttgatgcattttgccttccattagcagcttgaaaagaagcgacaatatttttagaaaacgtgaataactatacaatacctattgatttaggtttaatcagatagaaaaagacaaatattgagtgatttcaacatgactgccgtttaagatgaaaccaaactagcaatgtaaaaagagtgcaaatatatacaaccaacgtgcaattttatagatttatcctttataagcatgaggactacgctgacgaatcctccttccccaaaagaaaaatatgaaaggaataggaactaagccacaaccaacaaatgccagaagagaagtagcccaatggtaattcaaattattatacattggtcgagcaacaatcgtcattccaccgccagcggcataacgagtaaatgtagctacggataatgcactagccgccatctcatggtagcaatccaccaaataactatagcatacagcaagaacatacaaaaagccccatcccagaaaaataccactaaccatgggtgcagcccaatgaaccgaagggtagcacgtccagcctaaccaaaacaacgcaatgggaataaagaatgaaccgaagaatagaggaaacagtctatcttccggacaaatatttccatctctcatttcataacgacgtctgtaatgaacataaataataggagttaaagcaagaccaagtaaaatgccgaccagaattccaagaatagccaaaccaacttcaccggcgttaaaaccgtattggtaaaaaataagggggtaaccaaccatgcaaatatacaaaagaatattgatgaataccaagtacatgcaaaatgcttggacaatgggttcagtacacaacaatcgcacacctctcgtcaaagccgtcctaattgcataggcaggatccctttgatgctcatgctcgttgtaccatttgtcacaatttgtttttttacgcaagtaacgagccttgaaatccaacaacgtttcactatgggtttctggcatcgtgaaacaaacgattacccatgtcaaaccagcccaaatcatgttgatccaaaaatcccagcgccaaccaagcttgctttctgtaatatatccacccattacgggaccaactaaaggaccaacaaatgcggcagcacagaacactaaaagggcaccagttcgctgaattgggttgaagagatcgctaatagtaccaccacaggctgacataggtgtacaaccgaaaaatccgtgaaaaaagcggaaaataacaagactccaaatatttttggaacatccaccaccaatttggaaaacaacaaaaataactaacgtaactgagtaaagaggaagtctaccatacacttcacttaaaggtgcaaataaaacagaaccagctgcaaaaccaagcaaaaaggtagccgagcagagatctcccacagtagcaccaacatgatattgttgtgcagcaatgccaccaccgtcagaaaagatactagagttggctgtaatgacaatagcgataaaggatgcaaccaaaagtgtatagatttttttccacattggccaattcttaggggctaaaggatccttaccagattcccattcgacctgataactatcctctccactatcatcttcagtatccgaggtagtattatctgaagatcgagtattgttagtagaagttaaatcttcctcgtcactagaattcggattggattcaaccttctcacgttctctgtgaaatggcaagtttcgatcattaccaagatacctcttctcattttcaattgcacgagattttgcattgtatgcctcgagatttaaatgtcggtacttatacccagttattaagaaaatgtaatccatgttcgtcaaaaactcaagaggattagataagctgtatggaataacaaaaataataaaatcaataactataaagagacttcaacttgaaaggtatgcttagcgagtttacagtatgtacccactaacagtgaaaatttacaaacgattgttgatgatgaacaaagtaagaatgcagaaaccaattgagggtgaaacaaaatgataaaatccagtcgttaaaaaaatccggcgcagtgagcaaaaagtacgatcgccgacgtgggattgataaaaaaaaacaagtttagttacttgggaataggttaatgccagatgcaagtaaacttctcaaagaaacgtaagaagagagtttaagccgttgtcagtaatatataaacaacaaacactaagcaatgcgtgaataaaaacaaataaagttgaggtaaagcgagatgtgctaaaagtgaaaaaaattggataagattataatccaaataagcacaaatatcttttcgagaaaatccttcaacgactagtggattttcaaaaacaaagtttcaaaaataattttaaaatatttaacgtttttgaaaaaagattatgacaaccaaagttacactctccagtcaatagagtataggaatcagaaaacaaaacgaacaagcaaactaaacgaagccaaggaaggaacaaagcagataacagacgggatactatgttgcctttgatgaatggggtgaaatataatgcgaggtaaaccttctgagcaaaaaagaaagtaaataatataatcgatttctttgtcactgctaaaaggtacgtaataatttaaaatataaagatatgtatatataccatgtatgaatatacaaacaaggaaaatagaatgatagcaactaaattataaaaacgttgcaatggaaagcgaactaagcgatataaagaaagggaaatggtaaagttatcgagggagaccaaggaagtacttaacaccaaataaaagtgaaagtttgtagataaatagtgtaaacacacgaatgtttcacttggttgaccaaactttaaaaactaaaaaaaagtaacggttggagagcgtactttaagaaagaaaggaaaaaggggggaagaaagataagagaagaagaaaataaagaaagtaatatatttataacactaattgcgagcgatgcattcagcaatggtgaattgaaagtcaatgtttaccaaaccgggcaacttttttgtagaagcaacgatcttaggaaaaacgttgatgacgattttcttttttccaaatcctttaaacagaaaaccaacttgtagcgttgtcgtctgttttacacaatctacaaagctgaaatgaccaagtagaatgaacgaaaagagaaaaaagttgctctcgaaataaaaaataaaagaacccaacaaaaagaaaactgagttagggaaagggattaaaagaataataaaaaaaagtcttgaaaagagataaaggggttttcaagacagaggagaaaaaaaaagtacaatggtgattaaaacaaccaagcgatgcagaagattttagataactaagaaaaacaaggaccaaaagggaggtacacagtaactaagatccaacgtagtaaggagaaaaagagtgaaaaagattagtaacaactaaaaaaaaaagagagagagagaaaagtcaagagttttgtaaaacaggtgtaagtaaacttgagcaaaaccacctttacttgaagaaacgatggaagttgatggcagatgggagcaaacaggtagacgacaacttagctactaccaaacctgatttacctttgagttagaggagggatggcagcacatataaaggaattgaccaggagaatgcaggccaaatattgcttgacctgttagaaacaaactagtcaaacatttaatgtttacgtcaaccccctgctaatgagaaagatagtagatgaaacaaagttcggttacatgatcaccgaaggtcaaccgtgatctcatggcaagtaacaatgtacgtcgggaggagagagtttagttgaattgggtttctcagagaagcaacacaatgaatgattggctagaaggaaaaaaatccaccaatggagaatcggtctagaaccggcaatccagtctaaacgcggggggaccagtcgatgtgatcatagaaaaagaagcataaatgccgaggtcatgacgaaatcctagtaaggaagactggtgtgttggaaggagagagtgcatgtgattggttaatctcttgatagcctgccagggcaacgagaagatgctacaagtaccgtgatcctcgtttctcaacggtgattgggtaggagagccagtctcgagtgatgaatggctggtcacagtaatcgatttgtggggtaaaaggacccaagggtcgagacccctccatacccagtgctttgcgcgatggaggagatgagtgcgatgcgatgtgttactcaaaaataaagacgtgggtggcaatcacctaaagcggaatagtgtgaaggggggaggccaacagagagaaggggaatggagagtaagaggccaaagtagagtggaagaaagatgcataaggggggaagtgtagcgtaggcaatgcagtgtcgttggttatagctgaggagatagcggagaaaggaataaagtaagacgtcgacaagatgccgatttgatgaatcaagcgatgagattaatggatgggttggggtataaacaattgtttgattgatcccaacaaaatgcgcctgtgccttttactactccacctttataatgctaaaggaggagaagtaataagatggcacgtttattttttgggccgccactggaatgtggaattgtttgtataggtatggatggatcacccagtatatctgattacttgaattgcaagtttttgccatcaagatggttttacaatccgttgcttttccggctctagtattttgattgatcgtttgtttgatgcttcgtttgactgctgcttatgttgcttgtgttgctgcccatacccaaaaaaccggcgcttaaccaaatgtaaacaaaaagcgcatctctgtcatttgggttattggacaataaagacgaattgtttattgttgaaatatttattctaggataaaaaaacaaaagagtttgtcaaggatgagctttgtaaaaaaataaatcgctttctcatgcatcaaatcgatggataaacacttcactgcaaaaatgaaatatcggttggatatatgacaaacactgaaatacaatgaagaattccccatgtttatgaatacaatccgtcttttctttttttttcaatcacacatactctttctctctctcatacactctctatccactgcgttccgctccgttgtgcgtttaccatatgcaagcagaaagcgttgagaaaacacaaaatgcccccaaatttaacatttagacatgcagctgaaccgtagcaataaaaacttagctaggcgaaacgtgccatacagtaaagtgttttatctccattcattgaaaacatcagtaaggacgaaaagaataaatctaaaaaatattcattcatatctaaacgctgaaaattgcaatgataaaaaaaattttttttttctctccaaaactatttcattcactaattttgttgcatcaaatcatcttaataaaaaaattcccataagattagataaattgaatggattgacgttgttaacgaaaaaaaattttttttttttttttttttttttcaccaccataacttatagccagtcattacgttatacgcttttgcttatcgtctttctttttttttaaaaaaaaaattgaaaaaatttatcttttatttttgttttttttatttccaaggttttgttccttttagttgtacattgggtagattgacatgttgatgatcagttgtgcatcgtatttgtattattcgtaattgaattcgaatcaataaatgatccccttttttgtcctttgcctttctttcttaccttctaaatttaaactggttttgctcattgttaggcaaacccattcctatcatccacactacaagtatgtagctaattatattaaaaagccaaatagtgtatatgattctactttagttaaaagttgttattttaagttaaaagaatagtaacgtaatcttttgacgttagctacgcagtttcgtatttgattaaacgatacgtaggactgcggtgagttttccttgtgatttaatatattagtgtagtatagctgacattgccctccccaaaattttctatgtaaatctgaggataagtcatatgttctcagatatttagattattggttttaatataatcgttaacaattgctttgtccgcttgtaacgatgtagctaatatagtccatcctgctataatagtacttggattgagattcgaaatgtacttaacatttagatagagtacctgttctctatttttatggtctaggatatgaagaattgttccaatatcagactcatcaatggtagcgtagttgagttctgaatcatgtcaatacttttctaggtgagaagcatgaaaagtagatggaaacatgtgtttgattgattctggaagatccaattcatagttatttgggcccgaattctgtaacacagagaacggtcctgcaaaactaggtgctaatttattggatttgtgaagaaaacctgtgttcgttcttttaaccataactaggtctctaggttgaaattcttcgatttcttgtattttcatattgaaatactttttcacctttatgttgtttgtattcaagtgttctttaactgtttgaaatactcggatcgtttcctgagaggtttcatcagttttgtcactaaagctaggtaattctaagggtgataaagctggtgaatagcgatgtgctatctcaaaaggtgtcatttgagtagctgaatgtatcgcattattgtaagattgttgcactagagatatatgatctacccatgtatttggatgtctgctacatacacatcttagtaattgctccacagtttggtttgtacgttcagttcgtccatcagtttgtgttctgtatggtaacgcaaatttcatgacgaaattatatttatgtgcgaagtctttccacgattgggaagtaaaaatatgatcattatctgcgatgatttcttttggattgttgaaataagcaataactcgttgatcaaacattcaagctgtttgttctgctgtaatggatttcgtacaaggtaataagattgccatttttgaaaaaacggttaactaccataaaaagtgcattataaccggatgattctggtaaggctgtaataaaatccattgataaagattcccaaggtctttctgatggggaaattgggtgtaagggtccataaggtttatgatttctagatttgtttatttgacatgtatggcaattctgtacaattcttgtacttgttttcttagacctttccacgtaaatctacgtaatatagtgcttgtaacaagttcaatgcttggatgaatcaatttcccttcttcatgatactttttaataattgtcctagtcagctgagtatcattaggtaataagatttggcctttactgttaaatagtaagccatccttaagttgcatattctcttccactcgcttgtcttcattgtttagtaaatttagcaattttgtatcatttgtatattctgtaaccacttgatttttaaagtcatctgttattgagatttggttcacagagtttatattattgtcttctgaatcttctgggattggttctgtttcatcaataattctggataaggcatcagctatgaggtttgccgatccaggtctgtagttaatcttaaagctaaagtcttgtaaaaatagttgccaacgagctaaacgtttgttttcaggctcagattcgttagtaatgtaaccaattaagttgcggtggtctgttaaaatgttgaaaggttcgatagtggatcccaaatagtgtctacagtgtttgagagacttaatgattgcaaacatttatttgtccgatacgctgtaattccattgtgcttagacatctttgctaaatagcatccaacaggactgtacttatcagataattaagtgtattcttaatctcaactgaggataataccttgccctttatactttaacactttccacaccatggtgtgtgtttagtagcgacatattgcacaccatttgtgaaaaggtagaaagctaaggctacaccataccttgaccagctgttatcattaatagtatctggcttgttgcctgaacgtctgctcaattgtatgctagagtcagtgacaacgtcaagatcagtatcatagtactctgaactctgaccatcataatcttctgggagaccataaccgaaatagtcataatgttcctgtaactgtaattctgagtgcgatccactgactgcatagacattatgtgttactaatgcaacattagctctgtcatcatagttattgatacactgccttaataaattttccatttcatcactaattgtatagttattattattatagccatcaacggacacccagtaatatttttgccccagataggcaatttgatctatcactgccctctgctcaagaatcgtcgtagtacaattaacgactgcttgaagatcatcatctgtaagattataactactctttcttagtagtactttatcgctaacttgttctaaagtgtgatatgccagagacaacataagacctccaacagttgtaatatatagataatcgtcttcatcaagtacgaaaactaaacttataatgctgttaatagttaaaatagttttttcccttagaacccagaagaagagaaatatatatatttataatcaataattcctttttcttgaaaagaattaattttagttagcgtaatgtagtatcgctgacagttaaaatcaaatcttgtatttcctttattctcgaaattgtcagctacgccgtttggtatctattttgacgatacatagaaccacggtgagttttccttgtgatctattatattacaatacacaggttgtataagtagcaactgagtataggtattgtattaactgggttataatgttacctatcactaatatagctcataactgaactgaggaacgagattcagcagtagctctatttatagtattcagataatattgatcttaatagattatcattaagattaatctccatatcgtatcatacatggtacgatatataattagaacatgtgacatatagtgatacgcaacgtagtatatcatagcgtagtgtagtattgctgacaaataaaacgaattatcgtttattccttataatatcgatattatataaaaacataagacaataaattctaaaggatatcgagttatatcaaacctacaaaaaaaatagtgaaacggaacccttgaaggaaaaatgagacaaaatcactatattgatcttgataatgtagacttgagattgtaatttatatatcaacatgagaatgaaatacagcatatacaaaagtcaagggtgtcgttgaaagcatgataagagctaaagacattcgtttctgtcttttctcactcatcttataatcaaattcatctttccaaaaacttactaatcttccaaccattttacgtaccgcggtcgtagttaattttttaaagctattttcctcggcaccatttccgggtagtaaaagttattgtttcaccactcgcgtgatccaacagcagttgttttaacgagaacagagctttattgtacataggcggcatgatttgttgccacttatatgcggtaataatcggtctaaaaatgaggcttgaaatttaaggtaaaaggaaatatgctaaggatgttataccatacaaaagtttgttaagagacatcactgtaaagaagatttctagctaacctttttatccaattgacccattcatgtttacttaacctgcggataaaacgcatgaatattcagtttagcatcagcacagacatcaatgctatctacaatgacaaaattcaatgcatgcaacctaccaactttggctgcaaatactttggatatttgcagtttagagctctactactagcaatctatggttaattaaacgaatcaaactgttcataaaaattaattctgcatcttttttgcctttcttttgagagctcacttagcctaacgtcttttgatatactttttatctcttgacacccggcttttcggccgtctttactgtgccacttcaaaccatttcatacgaagaatacaaatattctggttaacccattcaagtaggattgttttgaataataccgtcatttccgagatgccattaaccccagctttcgcacgaaagaatggatttagtattccagacaatagaataattatccttaattataacatacgtttgtttctaaataacggtcctagtaacatgatacttattactatattcttatagaagttttaaaagatattagtataccactgtttggtttgaaaagatataccaatgtatcggtttataatgcaaaaaaaatatttaatgcagctttacgctccagtaaattgtctaaatacttcatttatcatttgaaagacgaagaataattcgtattttgaatatctaataatccagtttcctaaatattacttctctcgaacaacaagagcatactattctggttttcttggttctaccctttattactccggtgtctagatatcgttaccgttatgatctgcattttgaaaatttttatatcaatttaagaattcattaagagttttgtatgctaacagctagactgtctacaaaaatgaattacaaagtgccgacgtagtccaatatacttaccctaaatggtttcttaactcgaaaacctgataacggaaaatgattttttttttattctgctttgctctgttaatgctactaaacaagtataaattaaccgacttgctccttctcccataaattatgtcaacttcggctcccccctttatcccggtattattttcaactacctggattcttccgttcacaacgttatattttttgcccttctccctatactaactctacttttttgagaagtgccaaactgcaaagtttgattctaatttaacgtttctttaaaggattctcttcatgcatctgtatatataatatttaacgataacattttaattcaagaatctgcagtacgtgttcgctgcattcgtcgctttagtttctgcttaatttattgattattgggcatctcctttcttcttcgttccttcatatattatatgaataatagaagacctcgtcgttcgcaccactaagtagcaattccgacacgttttaatttcctttaccgaaacgatcgacaatcattttttcctctaatttatttaaaacttttcggtattgcatgtattccttcgtcatcattcgccttgtttttagatattttacgcccaatttaaaaccgctcctattttattttttatcttattctttacccttggtttcggtttaaatttatcttgacatccatctacggtcctcattacaatcatcaagttcattgatgttgttttctttaacaaggattaaataatcatattttaaatcactcatcgggcagctatatctttggtatcatatcattgtccgttggatttcttagttcaaattattgacaatcgtttgctgtttctcagttaagcaagaacgattgccgtattttattaatttgtttagctattgctagagtatttagcaggttgcatttcttcaacgttggtccctcatccaagtatataatacatacttgttgattcaactttgaaatttttttgtccttctgcatgccaactaggggacattcgcattatcacttgatccattttattttcttttatcgcaacttccaacttactctgcagttgattattttttctgttataattttatcaactgattttacttttctgtttagttgtgtgtcgttttcgtttttcttttctcttcttacattaaaaaaacttgtttgtctttttacttttgttccaagttgttttcagattactatactttcttcgttatttcgaattctgctttgactactgatttttctcgaactctttaatttattttcaaattttttgttagtttctcattcttgtcgactgctttgacataatggatattgtaaagcagcgttatcatgaactttttgacttgcgggtgcgtggtccccgcatgaagatggcagatcgtcttgaacatttcacttgggcctggtttgcatctgctatgggtacaggcggtataggtatggttactagtctgtaccattttcggttttacggtcttaatactttaggaaaaatcatttttattttccaattatctatcctaacgttatacatttgctgcatcacgtttcgtttcatccgctacccgggtactcttagtaaaacatggaaaaatccttcagaggtattattcatgcctactgctttactggcaattgctacctctatcagtaatttatatccatacgcctttccttacactggtgaatggatggtatggttaattcgaattttatattggatattcgttgcagttgcttgcatctttgtgatttcacttttttattctctttttcatgcacaccctttccgcatcaatactatcatacctgccctggttttacccatctttccttgtatgatttgtggtgttattgctagtgctattgttgagtcgcaaccggctagacaagctaaaaatatggtagtggcaggtattgcatttcaaggccttggtttttggatttatatcattgtttatgctgtgaacatgtgcagattttttaccgttggcctacagcccgctgctgatcgacctggtatgttcattctcgtcagccctccttcttttactggccttactttgcttgatctcgcttttggtgcaaaagcaaaacgtccctatatttttgttggagataattcttctgaatacttagagtttgttgcaacttttatggctttattcatgataggactgggtattttcaacttctgtcttgcatttgtgtccgttgttgctggattctgtacacgacaacgaattaaatttaaagtcagttggtttgccatgatttttgccaatgtgggactggttatggatgttcaagaattggggagagccatagattcaaaggctgtttgtattgtcggccaggtttgtggtgtcaccatcactatcgtgtggattatcctaatcttattaactttgcgtgctgtctatgtacaggaactgctgtatcccggaaaagatgaagacatagatacgatattgcctaatgtacttgaatattaccgacatctggaagaagaagagaaagatgaagccgaaaggtcaaaaaggaaggcggaagagagtgatgggaaaaccactcgagagttgacttctggaggtctttaaaccgccaacgaatacttcagtgtatctactttttcaatgtattccatcactgaaacatatcgtgtgatggagtcgaatctttgaagttgaccatgatggatcaatatgatggttctataaaatttttctgtctttttaaatttatggttactttcgactagaaagtgagaagtgaaaattaaaaatcttagttattttcactgtgtaatgtatgtcgaatatagaatgtctgaccttttattcccggctgatgcatgtgtgtgcgagaaacttatcgtgaagcttacaaatagagaaaagcatgaatttgatctaacctgttcaacaaacttgaaactttgtcttttggtcatttaaaattacagctgaaaagcaactttgtaaaatgcgaaccaacaatgattacgctgtttcccatatggcgaaatagaaagaatgaacagttcctctgtttattttatctaatttattctaactcattctaatcttcttgttttcttccctaatacaacgttgagagtattttggacaataaagtttccttcagcttaatgacctcactcaaaacttagatacaattcactttggatttgccaaagaatgtatagattaatagactcatgcacatcgttggcatgtacatagataaatgagaattttcgtaatgttttaaaacatgctgtatataaattattttaatttacaaatatttttataatcagatgacttagcgaaataagaatcaaaatgcacacatttatctagttcatagagaaattgaaaattggaaactttatgcttcctgctagtaacttaaaactattctttgaatttgaataatttatcaaatgcatcaaataattaaaacatagatcacatgaagtgcggtttttttttaatctatgttacatctctcttttatgccgacattatgggccaccgaactccccccatatagactgggagtatgtgggcagtatcgatagtacgttgtctcacttctgccaacaccacactgcctttttgtcatcaaaaagtttttattgaaaaaatcttttactagattgaaagggacatcatgctatcagcaaatatgcttcgtcgtatgcaccatggtgttgctgtaactagaatgctgcttgtttcgaatgggtaagtaagatagatcagtatattgatgcttctggttcatcgattaatcgtaatgaattttaaacgaaaatctaatcagtgtgcagaaaagttcaggttaaaaagtctgctctttatcctgttatggctaagctagctcgcacatacgctaccaaaagtaagtgattgcttttttggctgagaaatggctttctaacagttaccatagactatcctgctcataccgtgattaacatgcccgctttgtctccgactatgactactggcaatattggagcattccaaaagaaaattggagacaaaattgaacctggcgatgttttgtgtgagattgaaacggataaggcccagattgactttgaacaacaggacgagggctaccttgcaaaaattttgattgaaactggcactaaggatgttcctgttggcaagcccttagctgttacagtcgaaaatgaaggagacgttgccgctatggctgatttcaccattgaggattcgtctgccaaggaaccctcagctaagagcggtgaagaaaagtcggctccttctagcgagaaacaatcaaaagagacctctagcccatctaatgtttctggcgaagaacgcggtgatcgcgtttttgcttcacctctggctcgcaagttggccgaagagaaggatcttgacttatcccaaattcgcggctcaggtcccaatggacgtattattaaggtcgatattgaaaactttaaacctgtggtcgcacctaaaccttcaaatgaggctgctgctaaagctacaactcctgctgcctccgctgccgacgcagcagcacctggtgactatgaagatcttcctttaagcaacatgcgtaagatcattgcttctcgtcttgcagaaagtaaaaacatgaaccctcattactacgttacggtctcggttaacatggaaaaaatcattcgcctccgtgctgccctcaacgccatggctgatggacgctataagctttcggttaacgaccttgttatcaaagctactactgctgctttgaggcaagttcccgaagttaatgcggcttggatgggtgactttattcgtcaatataagaacgtcgatatttctatggctgttgctacaccttctggtttaatcactcctgtaattcgcaatactcatgcactcggtcttgcagaaatttccactttagctaaggattatggccaacgtgcccgtaacaacaaattgaagcctgaggaatatcaaggaggcacattcaccatctctaatttgggtatgttccctgttgatcaattcactgctatcatcaatcctcctcaagcctgtatccttgctgtgggaaccactgttgatacagttgttcctgattcaacctctgaaaagggctttaaggttgcccccataatgaaatgcactcttagttccgatcatcgtgttgttgatggtgctatggctgctcgatttaccaccgccctaaaaaagatcttggaaaatccattggagattatgctttaaaataaagcaaaagtcgggttgctcatactatcatgcaattattttgtcaataaaggtgtttactcaggttatgttttcggagctttaacaggagcttacgatcaatcgttgtaggtagattgagcattctttgtttcttgtatacatttactactacaattggctgtttgaaaaaacgattttatttactaagtgactttgttccgtttctgtcttataatactttgcttgctttgcaagcttataattttccttcctatgtttattaaatattacttttgtttagaattaataatacttaagtaatcttgttgatatcgttagtattgacggcaggaagcgcaataatagctacgttaagtgctgttgggtatgtaaattattgttgttttattcaatatatttcaatagattgttgcttagtaagtgataaccgacatcccttgttttaaaccagttcaaatgttcgtttgcaaatggatatctttaataatgtctattggcatcaaaatctggcttcttaattcataaaagagatttaaagatatagggaatgtttaagttttagagaatatgagcatgttcggtaagaaaaactttcaggaaaggtaagcaggaataaggatataaggcatgttctataacctttgataaagtcatttaaatattcgaaagttgttttcgcagtaaacgctttatttatggctcatgagtcatttctcaataacaagatcatttacatatgtctgtaaactcattaatcttcagatcagttatttttggtggcgtgttccacttaagatagcagtttgcactaaataattaactgaattatacggatcacttttctattttttgtgtttagaggataccggtagacacatttactcaaaataagcttacacaagcgactcgtttaaagttaccttaatacgtcatttttaatacgtgaagctatatattgattttgatcatcgtactactcagaagtatccgttaaccaactaaaattgctgtccatgtgatagccagttttttaggtcctatgtggttactatttcgttctaagcataagaagttagtccttcgatgttttccttcggggaaactaggagaaacggaaccgaatgggtcacctctagcatacctaagttattatgctgcatccaattcgagtaaactgagaaaagtggctcattttttagggagtcgtgttcgtcatagctattatcataaacgtgataagtaagttcctgttttaggctctatttctaaatgtttttagtgaggttattatcggattgaaaatatgcaaaacattggttcaaaaatgtcgggataacatcaacgtgatggcctccgaagttgtaaatatgctccttgttgctagttcgtcaaaaaatttagaagttttgtctgcctgcgttgattgttttgctacgttttgcgataatagtggaaaggggagtcctgccacttttggcaacgaattccattctgcttttaataacttagtcaattcattttttgaattatcaaaaggtattgattgtgttgatcctcagcagtcgaaaatgcttggcctgaaagcattccatgctttaaccgcatgcaagtttgctggaactgaaggcggaatgcgttatcaacctcattttgctatacattgcgttttgattaattcttggagtgaatcagatcaggagaagaagtcatttattgatttggttcgttccacggctaaatcatataagccattgcctcctagtagtactggtgtttcattacccgagcatgatgaagcgggtgataatatagatgttgccattaagaagttatgtattagaattttgttcaacatatatactcagacagatcctctgtttatggccgaaagtacgaagtccttgatacatttttttgcagcaaaatccgacactccggtaaatctagaatacatatctgtcgtgcttaaccaaattttggattggactcctgttgaacttcgacattcgatctttttctgttgtcttcgttgtttatcaagttctcgtattgtcaactctgaaactaatgtgatggtgccatacatgatttactccattcttaactcgaaaaactcaatttctggcttatccgttattgacgtgttacgtgatttggggtcgcatcttatcaacgctgtcaattcattcgatgctgatgaccaaacttggtataatatgtgtgaatctccatcggaaaagctccctaggcgcctttatttacttttggtttgtatcacctgtttaactaagcatcaatattacgatgaagaatttgctgatgtatggcgagaaatcgacactcttgctaattctgaaacttcttctgctatacaaatggtagctttaacagcttttcataagctgcaaaatgaaaagctaaatacaaaaaaagaatccagtgctcctctctctttagttaccgactttttgttgcatagctggcccaaatccgctgaacgtcttcacacttcccagtcaccttttgtacgaataaaaactgctgaggtgttctacgaatttttgtgctttctccgtccatctttaataaatttcgatactattttacggaaaagtgcaatcacatcattttctgtattatgggattttatatatgaaaccagttggcatattgaacgttggctcaaggtgttttcggtgcagtctgaattttatattctaaaactcatcatccaaaggctttaccagctttatggtccagtttctgtaacagcggtattacctgctatgtatcgcggactacgaccctttgaaaatgatcctcctcgctgtattgccgaggcggttactgcttattatatcatctatattggagagaatttgaagatcacaactcttcagtcaagtggacgaaagtggcttgattcattatctagctcattaccttcgagtctcttgaacagaggttcttctacgcattcttgggagaaactaacaaatgcctctaccgaggaagtcatgttgcctttggacatggttgtaaatgaattattggagaaaagcccgaaagtattcccagaggactctagactactatttgctgagcaatcgcgacaccccaagtacaccgatattattcaaaaattaaagaaaccgtctcgcgaaaagtcttttacttcttcttcagaatattcacttccatttatatcaccggcttcggattaccaacaaaatcctttacttcatgctaccaagtcgctcgtttctattcaccagcaatcacaacgtggagaaatggttagcacattgaaacaggctctatcaaggccacacactgctagtactgtcgtacgttctccgtcggaaataaatcttacaagacaaacgagcaaccgtgtacctctgcttgatatgttgaatcttaatcgtgctatgtctccgacacctattcaaagtcctccatatgtacgcacttagttctacatatacatattttgcacttaaaaaatgaaaaaaagaattatcgttgcaaatctatatttaaccatgcaatttaaatttcaattcctaagttataagtaaatttaattactgagtagtataccaaattatattaatcaacaatataacattcactagcctatcctgattacaacaactcaagatctacttaaatccgaagtaaaaaatgtttacttcttggcgccagccttaacagcggccttagtgaccttagcggcaccaggggcaaccttctcaacggccttgatgacaccgacagcgacggtttgacgcatgtcacggacagcgaaacgaccaagaggagcgtagtcagtgaaagcttcaacacacataggcttggaaggaaccatcttagcaatgcaagcatcaccagacttgacaaacttgggggactcctcaatcttcttaccggaacgacggtcaatcttctcaatgagctcagcgaacttgcaagcaatgtgagcagtgtggcaatccaaaacaggagagtaaccagcagagatttgaccggggtggttaagaatgatgacttgagcggtgaagctagcacaacccatgggaggatcgttcttggagtcaccacagacgttaccacggcgaatatccttgacggaaacgttcttaacgttgaaaccaacgttgtcaccgggaagaccagcgtcgagagactcgtggtgcatctcaacagacttgacttcggtagtgacaccagcgggagcgaaggtgacaatcataccgggcttgataacaccagtctcaacacgaccgacgggaactgtaccaataccaccgatcttgtaaacatcttgaagggggagacgaagaggcttgtcagtgggacgtgcagggggctcaatggagtcaatagcctccaaaagagtcttacccttgacgacaccagccttggtctccttttgccagccttggtaccagggcatgttggtggtgggctcaatcatgttatcaccttggaaaccggagacagggacgaaaggaacggtcttggggttgaaaccgaccttcttgatgaagttggaggtctccttaacgatttcctcgaaacgagcttgggaccagccagtggtgtccatcttgttgacggcaacaataagttgcttgacacccaaggtgtaagcaagcaaagcgtgctcacgggtttgaccatccttggagataccagcctcgaactcaccagtaccaccaccaataataaggacagcacagtcagcttgagaagtaccggtaatcatgttcttgatgaaatcacggtgaccgggggcatcaatgacagtaacattgtacttgggagtctcgaacttccaaagggcaatgtcgatagtgataccacgttcacgctcggccttgagcttgtccaaaacccaggcgtacttgaaggaacccttacccaactcggtggcttccttctcgaatttttcaatggtacgcttgtcaataccaccgcacttgtaaatcaggtgaccagtggtggtagacttaccagaatcgacgtgaccgataacaacgacgttaatatgtcccttttccttgcccattttttacaattaaattttttggcgtgtggtgaatgacaaaggcgaagcatccttctagtactactaagtgatttgtgactgctctccacaagaaaatatgtgactacttttagatgaaatctggttaccgagctgcagaagactacggcaaatagctgttaaagtagtttattggtatgaatcttatagtttatgtggaaaaggtgagaaaagcctatgtatatttaaaaggacgtaaagtcatatgtaaataattattgaagactctaaggagtttattccatcataagcaaagcgagttataaaaaactaaatactatcctataacaactgcatagcagtgtgacaaaatgtgattagcaatcgttaagctaatataagaaagtctgcattttaataatgaactacgtcggcctgtgttaaataaatatagcgcaatagaacgtagattcatttttattaactataaacaatagacctaaaagaatgttgaacaataggtaattacaagtgaaacacatagaaagggcttactcgaaacaattaatgaagtaataaatgaccacaataattcaaatcctctgttagtgttttttagaaatagctgattttctttataactctatgtgatagacatttcactatacttgaattgattacctagctagtcattgaactagctatactgaaatttaggcgaacaaacagctttttatcaaattttcaattgcgaacgttttaatctgataataaaaatgcatgtcaaaaagttgtgcagtatgaggaatttttttgactctgatggttgtcgataattccagcagaatcatttaagcaaagtctacttcttataacaatagaagtattgatatgcaaacatagcattgtaatcataagctctatatcttctagtaacttaaacgttgcgagtaatttcttaagtaccatagtttggacttgtttatttcagcccaagcaaacgattttctgtttatctgctttgttttgaatttaagttgaataagttgcatctttaccaatctacttaataaaacaaaagacgtaaaacatagatataaagtgtctcagtttgttatttaaggtatattgcccttatttcgaaaccatacagaatgatttgtcactgtatgcaaattaatacagagaagttttattaaattcacttatagaataaaaaacaaattgtatctaatagttttgagtctttttgtcgagaactgactgtaataagacttagtgatagatatacacaataaaagaaacttggacatttttgacacaaaataacttgtcgtaattatctttctaatccatagcagaaaagaatccgccagtatctgaacaaggaggatatcaagtgaaaaagatcacgttggaacatcggagtgtatatcgttaaaactagtggttcatttcatcctaccactctcaccccaaaaagtgggagaatcgacaaaactccaaaatgttgcatcgtcgaattcattttaaatcacagtccactttggactttgacagtgttgcagttagcatatctgccagtacgatgaaaaacgaattagataaacttgtactgaattccagagtttcggataaaaaaacgtttggcatacaaatggacaacttctttgctttgtatagaagatatttattacacacagttaaaggttatgaatgtgattgggattctatccggcctctgggacccgaagacatgatagattacggtgatttaccgttatgcaaaaatgctggaaagtacttaaatcggcttgcagttgttaaattaaatggaggtatgggaaatgcgttgggtgtgaattatcctaaagccatgattgaggttcgtgacaatcaaagtttcctcgaccttagcattcgccaaatcgaatatcttaacagacggtacgatgtgtccgtgcctttcattttaatgaactcttacgatacaaatgatgaaacctgtaaagttcttcgaaaatatgcaggctgcaagattgatatttctactttcgaacaatctcgatatccccgtgtatttgttgactctcaacttcctgttccaaaagctgctccctctcctattgaggagtggtacccaccaggtcatggtgatatttttgatgcgttagtccactccggtacaattgagcgattgctcgctcagggtaaagattacttatttgtcagcaacatcgacaatctcggggcttcggtggatcttaatattctgtctcatgtcatagacaatcaaatcgagtactcgatggaaattactgataaaacaaaagctgatattaaagttggcatccttgtcaaccaggacggcttactaagacttttagaaaccaaccaagttcccgaacaacatcgagaagaatttatgtctgataaagttttcaaatacattaatacgaataatgtgtggctttaccttccggcagtcaaacgcgtagttgaaaaccgagaactcaacttagatattatgccaaacatcgaaaccgtctactataacaatgagcctgcacgaattatagaatttacgacagcaattggttccgctatcagccaatttaaaaaaaccgagggaattcgagtttcaagaccacgctttatttctgtcaagaattcctccgatttattcttggtacgatgtgatttatacaacgttgatcatggttccttaaaaattgaagaatcaaggctcggttttccccctccagtcgttcgcatgtctaatgaatttaaagatatcgcagaacttttttgccgtattccttacatgcctagcatgaaagacctagtttctctatccatttctggaaatgtatatttcggaagaaacgtgatattaaaaggaaacatcgtgattgttgcttcggaaaataccatcctttgcatcccttccaatgcagttttagaaaattgtgttgtgacaggaaattgtaaaataatggagtgttgagcttcacaaaaaaaccgaaatctttcttttctcttttttcttcataatttctacataatgaattttcatatgcgcatcacgatgtttattttaactcatacccattttgggacataactttatgaccataatcgaactcgtcgcttacactactctttcagtaccattttcttctgaggacatctagcgattcgaaattactttactctctttaataaacaattatagtttcaattttatttctcatgttaaggatttgtaagattattttactgaactaaggcgaatgagtaaaggactcgaggctcgacgctgtttagataagaaatacctctaatatatcaaactaaataaattaatcaatctccatccttataaggccaccaattgcattcccattataggaaaatgcaaaattgcaatgaaggtcattctaccgacgtgaataacatttccaaaattcattctagcttcaccaactgtaaacaaaatcgtaaagcagacgatgtatagagaaatataaggacaataaacaaaggtattaaaaaatgaagcaaaagaaggtattaagaccttgttgctaacgatcaagggctggagatagtttaaatgagataggaaacgactacttaaattccatagcaaacacatgctaataggaagtattaaaaaagacaaactaggaatataaaaaacaattattacaataggagattgtcgttgtctaggaagttttgggttttagaaaccggttcgctagaagacgaaacaactctttccctagttgagttttcttgatgaactttgtttacggcagaggaccacagactaccaaaagcatcaccattagatccagaagatttggcagcagtaggttgttgtgaggttaatccgagaccggcttgtgaagaggtattagacaatccggatgacataccaaacgcagatgtataacccgtattaaaggtagtaggttgaggtgtaaaggcactggatgatgtgggaagttgatttaaactattaaagccaccgaacgaaattgacgaaaaggcagcagtatttgaagcgggtttggcggagggagcgctttgaaaatcatcaaaagcatcatcgtcatttttagcagcagttgaagcagtttgagagcccataaagagagaggcattgtttaaggtggaagaagctggggcagcggcagaactttggaagtcaccgaagccatcatcttcgaacgccaaaggagcagaagtatttgtttgtggttgggcaggagaaggctcattgtcaagacccaataaatcgatcattgcagattcctgttttggctgctcgggagctttgtcagattgtttggtagtagtgcgacgtgagccacgcgtggagtttgcggttgcagcatcgctggaaccaccatctccatcttcattgtactcctctacatcgttatcggatgcatcacgggaatcactcatagaagatgaatcatggtatccattaccataatcggtaaagccgccaccgtctccgtaaacgcgagttctataagaaccacgggaagagccaaagctaggaaacctagatttagagctagtggaaatcctagaatctccatcactaccaacacctataaatttaccacgattttgacgcgctctcttgcgttccttacggatacgttcgctatcgtttagtaattccaccagctctttagctcgagttcgaacattaagcccttggtccttttgacgatggtcgatgtagtgaaaattacgaagcattttaatagttgcttgatgtgctcgagcatcatctaccactctttcagacccgttcttgaccaaaaactccagaagctgaagtgctttgtaaatttgacgccattcttctgcagttttttcggtaaaccgacggtagatcattggtaaaatttcgtttaactgagagtagttgtgagttccttgggcaatttccatcatcaaagaagtactagcgccccagggttcattattcgttgcttcacgaactctggcttccatagatgtataattcattacaacattttgtgctttacgaaccgccgccttgatatcgtaaaggttgatgttcttcatcgtcgattgaatggactccatcttagataatgttttactttcttggatttctagttcctaaaggaatttatatccaattgtttaaatgaaacttttttaaagaagttttcgcttctcaaagaacgcgtaggcaacgagtatggaagtattgttgtcggtggatggggaaatcagatttctcagtctagccgcggctcctttttactttatcaagaaactgcatcatatatctttattctgctttactgagagaatttttttttattgatctacgaaatttagtaataacgattttaagggtgttcactaaatcccttgggaatacaaagttctatttacaggccctccttgtatgtatatattcacacacattttgtaggtgtcaaatgcgatttactatttgtttgtttcatccatatacagatttctctttccctttttaatttattattcagattaatctgattataaagttaacttggtgtttctatataactacccattataaattcgtaaaattataacctttattaaatcaaatggttcattcaatacataacggtttacggtttgaatactcgtgctcaatttatttcagactgaatcatataccatttatttcgatttacttttcagagtaaagaaattctacctctgctatactccaatctttttaatgtatatagttgatgaataacaataggagaaaaaagcaataataattgattatctttctacgcattaatcattcttaatggaagatgcctaaatatgtacataatgtttctaatattcaaatatgagcatttgaataaaacgggaattttctttttagcaacttattgtaaattcatctttcaaaaaattatttacatgaatatctttaaatacaagcagaccaaaaagcaggtttcaaaaaaaaataaaataaaaggctttatacaaaaggcttgtattcgggattccattcacgttcaataatccattccttcaatttagcatcatctttgggtaaatccacagtgctcattccctcagaaacagcttgcttcaagactgcaaaaacaatgtgacgagaaatttcgcgagcattgttcaaatctggcaagagggcttcatcagcagcaaataaagatctgggaacagtggccaaagcatcggaagctgctttcagcataccatcactcaataacttgcaacgggataacacacatgcaacaccaagagcagggtaaaggagggcattgttgcattgggaaatcacgtattttttaccattgcgattgagaggaggaagtggggaaccagtggctatcaaagcctttccatctgaccatttgtcaatttgatcgggcttcgcttccataagagtagtgggattagagattgggaaaatgatggggcgctcgacgtgcttgctcatttcacgaatggctttctctgtaaatttacccggttgaccggaacatcccaaaagaatggtgggcttgacgagtgcaatagcactctctaaattaatgtctccagaagggacttccttaaagtcagagtccttcttcaaaaatggcttttgtccatcagtagcaatcttagcatgtctctccaaaagcaaaccgcaacgatcaatcatgaaaagattacctctagccttatctaatgaaaggccatctgtcaccataccggcaacaatttggttggcgataccaacaccagcagtacctgcaccaaagatcatgatgcgctgctcggttaagggagatttcgtaacgtgaagggcgccaataatggcggccaatgctacggcaccggttccctggatatcatcgttaaagcaggcaatgtcaggacgatagtggtctaaaatgcgcttggcgttggcaagaccaaaatcctcaaaatgaataaaggcctcaggaaagacttcacgaatggcctttataacattgtccaaaaagctgtcatactgttcaccacgaacacgatcctttctcaaacccatgtattgatgatttttacgatgggtttcattgttggtgccaacatcgagaacaatgggcaagaatcgattagggtctaaacccgcgcataaagtcattaaatgtcccttggcaactgaaattaagacaccaccaacaccttgatcgccgatacccaaaataccttcagaatcggtaatgataatgtattcgacactatcggattttccaaactcggaaagctgttgcttgatataagacaaatcgttatgatcaatatccaaataacaaccctcaggataacgatatatatcggaaaactgcttgatggcatcgccttcggtaggtgtatagatgataggaatcatttcgatcaaatgttggctgatgagtgcgtaaaacagagtttggttggtgacgcttaattgagaaagatacaaattcttctgtaagggctcatcaccgattgctttgtactggtcataacagcgatccacttgttgttgcaaagtttcaacaatggggggaagacgtgatgaaatctcaaatttttgacgctcctcaggtgtaaaagcagtgtccttattgtagcgaggagagtttaacaaagttactccttttaaaggacactcgatttgttctttggttcctgcaggcattttcaaacttcaagtatgtgtagatcaaaaatccaaaatatcagaattactgtccttttcaaatgggtatagccctacttttaaataactattttttcgtcagttgttccggtaagacggtccacgtgctgatagtatagtgcaataaattgtgcgtgtcaaccaccaaacgtcacgattagcccagtcgacctcgcaatttttacgttcggttatagcagtagttgtcactttaaatgaatgatcccccttctcgccaccgattttcctatacattagggactcgagtccaatcaactaataacgtaaaaggattttcttacattttgaaacagataacttcgggtgttgccaggggacatggacagccgagaacaatctttacaacaatgccaatgcaaaatcgattgtcaagtttcgaagagattacacattaacaagaggattttatttaacatactaatacaccttgcatgctaactcggatgaacagccgattctttcatcttttgttgggcttggtaaaatgagaagtctaatagtccccccttcaagaaggttgattaaggatgttgatatatatatagtaataagaaatagctgcactatgtcattttgtttatgaaaaacaggttttcgttaatgcacttgattagtaaaatgcatttacccaaatagaaaacataagttgtttgctagcgattaaattactaatctaacaagttgagaatcactcttttcctggtgagctagtgtattttttttttggttagggcaaaatgcttattgagggttgcttgttcaagtaaataaataccttcatagaacaatatatagctttagctttgtgttaacttggataattgtttattaatgcagttctaaacaataagttgatgctttttgaataagaggaatttactacgcgaaatttagtttgcgactgtttctattctcatctgttaatgaaaacacgcgcaaacactctagtggtgttttcgatgaagtttggaacaaatctttcatataagttagtgaaatagacagggtaaataaaatgtctcaaaatgttttaatggcttcatactaatgaaactaagactagttaagataaagttggattttatttttattttttttatttaagacaactaacatgaacgagggttttgctttagttacccatctggattaaatcagtatcaacattaatgataatcaggaaccagatttattgagttttaaaagaaatcgctgtatttcttctttttgttgtttttttggctctgaattaaaaaaccacataacgctgcgtgatctttaaaatgcgatgacttcttcaatagaccatcgtttaatcccgaatttaaaaaatcaaggtacgatacgaagacattagtttaaatgttatttgtttttactgaacattctatggatgaatttcttttccgtatattgcttcagactttcttttcttacattatttatgtatcctgccacctcatttcttatcgtatatgctctccatcacattaacttggtttagcacaactctatcgtatcgttatcgaaatttaccgagtgtagaacatgctgttctcagacactcttatcgatgcgttgcatttctttacgagaaacttcaaaactacctttgacgcgcttgaaagcagccacatagattgaggcttacaatgtcaacatcgcgtttgctgttaccaacaactaaccaacagcaaaactcatcaccagtgataaaagaagtggacttggtaagctaggcattgcatttgtactttgctaataccttggtagaatcagaatactccaatacctgttgtttggcaaaaaacgaaaaagccaccttttgtttcatttcctcgacacgaaccttctgaaacaattgttatatcttcaaaacctaggcttttctcattcgccaaaaaaatcaaaccagaagctgaacagcgaaaacgtaaacgaacaactgagatttgaagatttttttcaaggtgattgcaaaaaacgtttgtaggaattgttggcggcatttttagtttttttttattttatcgctcgaatttttttaatttaatgagcctttattttttttctttttaatttcgttaaacgacctcttgaacgacattagtgttctttcaaacaatctagttgaagcttgaaagtatttgtgatagacagatatacaatccaatgctacgatgtcggatagttttgatgcagccgcctctcattttcatgctcgctcttcagtaaacgattcttcctttcacctttctcgtcaggaagaggccgagcttttggaaggtgccttgcatgccccctatcccgaagaattacttttcgatgatgatgaatacacagctaagacccaatatgatggtccgcgctatgctatgcctaccatgttttacccgaataagcccactcctggatggccattaaattacgtatttggaaatgagcgttctcgcttcgagaaaatcctttccaactttgtactgaggaatctcatgttgcaagtccttgcgccttgttttgtgttgctttggtgtgctgtcccgatgcctcgatacgaagactcgcagggaacggtacgtattcgcttttggttttttttaattttctactatggtatttacaatgctgttggcttactgtggatcactaaactttttcatatatactctgtaaattggtgtcctagtaaattgggtggtacaattacttatatacttttctggatgtttagtttgctggttggaagcttggtagtctattttacagcctggcgtcaaattacttttacgtggatcacccttatgtttatttccatgattattcccatcggcatttcattttccaaactttggaagaagcatagtcggcgcactgctcaattcttaacccagttggctttactggaacctgaggttcgaagcaatgctgtcttagaaaccattggatggaaagatgcttatgctcattattcttggtttattgtagtattgttggtaactttgcttgtttatatagttggagaatatctcactaatctttacatgtctacactacctcattcatctactgttgccattatgtacgtttactcttggacaggtactgtaagcttgtgcaacctcgtgtcttcttggattttgaacaccaaaacacactcttacgcccttgttacagtcttcaagttatattttgaattgactcttcaagtgtacgttagaaatctctatgcaaggttggagtctccacaacaatttgtcctcgtacaaatagcttcatcattaacaatgatgagtgtgatccctttgataacaatgtcacgtaccgttttccgtctcaacgtcttaatgactaaaagtatggattcgtatgtcgtgtaccgaaaaaatatgggacgaaatttttatgtgaaatgtgttgcctcgaacgtgagtatgctttcctttttaggttggtctttaatcttacattttggttcaaatgcacctctttatccttatttttcctttagcaaggaagaaccgtatagcttcaagttgactttttatgcatccactgcggtatggatcagtgaaatggttgcatcttatttaacacgtcttatcatgaggaaattctatgactttgaagtggctttggaagccataagagattttgtcgaatatcccgatatgatacctacgtttatcgccgtaagcattcatgtgttgcaaaatgtggtgtttagtataataagtcttcacttttgatgtcccttttcattttaaaacatatcttcccttttttcgtttccctttatcattttctttcaccttgttaatatacattcatctgtggatgacttattgaatttcatacatgtacatatcagtcttgtatacttggttaagtctttctttgttgctttataaagcgcacctgttttccgctcttgtggtgtttcagttaaacatctgctaatgtttatacattatttcatgctggcatggatacatattggatattacattcggtcctaaaatacacaatactttagattgtctaaggcttccctcctttgcaatagggaattcctatttactaaaattatcgttcgattatgcttaataggatgcatttaaaaaaatttccgtgctttcaacaagttggctcatcttgtttttattcccgcttgttggtgattggccattgtgtaaattagaaagttatttaattactactgatctcgatagcttcttctttttctgaaatggcttaaagaaaaagcatttattaaatatatacaattgttgttttaatcgtgcattgcttttggaaagtaataatttgagagaggtcgctataaatgctccttggtaattgaatggcgttgtcaataggtgaacaaatctatagctcattgtttttcacacgtacgtatgtatctcatttatcttcttgtctttccaaaacatacagaactatcttaggcagcaaccatatttaatgcttttaccttatcatccgttatttaaaaaatacgcagtaattaaattcgtaatctcatttaaggacctgaaaggtagtttgtccacgatgggggctaatggtagaaacctcacttgtcctcttccaaccacttgaagagccttgaacaagaaattatttgtacatgtcgcagtattacgagctttataggcgtagcaggtactttattagttgctttaagatgataatactaactttaacagcatagggtaattaaaaacaatattaggggatttcctctttgtgataattttgtatcgtgtctgacacatttgtagaatttcgcttacggatgctcttgatgatttaatttcacagggaaaaatatctcctcaactagcgatgaaagttttatttaacgtacgtaaatgaacaaatccttattcgtagaagttacctacctgctaatctcacaatttgatatagtttgacaaaagcatgactgaggcattagcggagaaggtccgctctcgtttaacattcaagggtcatttggatacatatcggttttgcgacgaggtttggacgtttatcataaaaaatcctagctttcgatttgataacgaaactgttactagcaacaaaattcgtatagtcgcatgtgcaactcgtgattcttcagccaaccgttaaatttgtaacgtttatttttccttttattcatttttcagtacatctttttcttattataaaagtttttataattacacattggtttcggtcatcgtcttcattactttgcaaaagcctggaaattatacacaacttttcgtattatttttgaatgagaggattggccgcattccgatgcttaatttggcattagtggttttggacttaatttcaaacgacggatctttactactttttcttcctttttttattctcttcatcctcttttgtccgtgcacgttttcacttgacagacatttgaaatttgctatttaaaaattttccttttcccacgtttccgaagacgccctcctctttgtcattgcaattccattttcatataaagtaaaaatttttccatatgaagtttggtctcctacatctaacaattatcgattttgtttgatcccttggtatcacgatcttactaaaacaacgccgtcttatttatgttgagcaatgcaatctcttcatcctgtgtgccttcgaagcttatgctgatcaaagttgctttgccatcatttcccttgatgtgtttggcattctcttaggtgctgagcaagatatactctctatccgttatcatgatgaattactactattttccgtttgactactattaaaaaggatttacatctatcttactatgaccattatgaactaacttactgagtggtgctttacaatacacatataaataaatttttttagacacttaacaaatttaatttcccaaaaattgagatttcaattggaatattaactatcaatagttaaatcaaaaatgtggtttttttaatataaataaactttcagaaaaatgagttcggttgggttttccaagcattgaaaccatagattaacacattttacaaaatcctattaaataaaaaaaaatccacaaacgtcgatacagtgagataatcattttcgaaaactgactgttcgaaaaccgttaaggcaagaatctccttaaagagtgagagagagagcgacagcaaagaatgcaatcacagcagaaataccaacaggttggctgactaaagaggcagcagatgatgagctggaagagctagaggcactggctgagctagaagagctggagtcagaggtggtgttggtagcgtcatcagtggtgttggtagtgtcattggtgctaagggcctccattacaccttttgtgatatgtccgctagcagtggtcttagaagtagtcaaactcttgctgctagtagggagcttggtcaaactgtgagaagtggtactggtggagttggtagagttggtaccgttggtagagttggtaccattcaaccagaaagtagagttggtggcattagaagcattgacgatgcaagtgaagttagtaccgttagtaccattgcaatatgtaccattggtagcattggtaatgttgtagtgagagatggtggtgtaagggaatacagtagggcgataagaggaggacttatgggaagtagtgcggtgagaagtagtacgagaagagctacgagaggaagacttggaagaagaggatgaagatttagatgaggatgaggaagaggaagaagaagaggaggaggaggaagaagtggtcgaaggagtggcagagctggaagaagaggttgtggaggaaaccaaagagctggaggaagaagaggaagaggaagaagaagaagcagcaccctcaacaatgttaaattgttgagattgagcataaatttgctcaggacgaccagggtaagccatgttgatttggaaaccttgaccagtgggccagttggtggtgttggtggtgtaagaaccagtgctggtgtcaacagtgtccaagtattgggtaacggtgggataaacagcaaagttggtcaagtaaagagcagcactgggttcatcagtggaaacgacattccaggtgatttgctcctcgccgttggtttgccaagtgtcaccattggtgggagagttaatcgacatagcgagagcagaagcaatcaaagccaaaaaggaaattttgaacaacattgtaggtatcgtaaaagagaaatatgttgtgtaacaaacaaaaaaaaagagtaaataaaactaagtttgatgttatttcgagatgctgggtaaaaaattcaaaaaaaaaagtgaattttatcagcaaaaaagagttggtgggacaggcgacaagtaaataaggaaagtataactagcgcagtaggcaaaacagaagattgtatgagatttccaaaaatgaatgggtaaacaacaaacgtcggttaatcttgtgcgaaaagagaaaacggggttttaataaaggaaaaaataaaataaatttgacgggatcaaaaagattctctaaatttcaggagaaaggaggaaacaattggaacttcaacaaataattaggtttaaattgataataaattaattagttcaacagtgaagtaatccaaatgcaattgaaaccaaaatcgttttttaatttaattagcaagatgaggaatttaattgacaagcaataaaaaaagaacgcgacttgtaagaagcgaacacaagcaaataggaaatatcagttaagacgttagtcaaaaactccctttttaatggaacgaaaaatttgacgggaagcgcttcttatatacaatcacggatcaacattttcggcgcgatgacggaacgctatcccggaccccgactgtgtaaaaatggtacagtctagaagcatctagttaaatattaaaataataaaaaatattttaagaaacatgtttgagtaaaaaaaactttatatatgctgtactaatgcttcttttaaattttttcaaagcgaccatttgccgtgtatatcagcacattcaaggttttccacgcactatctcctttagctttgactaggcgatagcattcgtcatattgcgctagaaggatactcgctcgacacgaggtagctgatgtcatttgaaagtcattaaacgatcgccattggcgggaaccagttgcgcggagcatgcgggaaaccaaggtgattacgaaggatgctaaagagcgtagggattaggcatcgctatttagtataaagtaaattaatgggtttcactaatacagacagtgatctcggtagatttgaacgttacgtgtgtgtaaaaatgtaatatcgatctttgtggtaagctcgcaatattttttagtgtatagcattccttgaaaattaagatggattaactatacaagcagcaattgcttttgaggtatacaatcaaaaggccatcatcctacccattttatatgaaagcaaatgaatagactgctgacggggcaacacttaaagagtaaagaataaatacaatacgtagggcttgcctatcaagtatagatggtgtaatcctttttttctttttcgctttttgttttttagtactttttcacacctttattgaaacatatctttattttttttgataatcatactctatattttgttgctttatttttagtgtcttttcttctaagctctctttagtagataaaatatcaccgattaaaatgattacaaaaagttgggcttttcattctctatatatacatctgctatatacgtattgagtttgctaccaattcttaatagccagccctctattaccacgaaacatctgattcagaaagtcaaaatcactttcttccgtgattaattgtttatcttgctgcttccgctaaactgttactttgcaaacctgacattccatagtatcggaaagtttctaaagcttttgtaaacaagacggtcgttcagcccaggcttattgctgacgatgttagttgtattattaaataatttctttgatgaaaaaagaaaaactcaaacaccatgggaaacatttagtagtgtatgagaagatttgttctttcacatagcttaatgttccagtatatatttattgagttgaaaacgaaataatttttaacttagatattgttttttttttttaaattattgtttggcttcttattttttttattgcattttattttattttgggttacttttttttttttttaagttgaaaattaaacaaattagccaaaaaaaaaagaaatcgaatatgctgaattgagctatagggttggatcctattaattagcaaaaattcctatagtttaaaaaaaaaaaaaaaaaaaaacaacgaaaaaaaaagagaaaaaaagagaaaaaatataaaacatatttctacttcactttgtacaatccatattgtctagtcaagtagttgcaagcctgttctgtatagcgaatgtcaactacgcagtttataatatttaacgatacttaggattgcagtgagttttcctcgtgatcaattatattgcaataaacaggtattttaagtagcagctgggtatatgtattctgttatgtaggtctattgttagttatcactaatgtagcttataaccgaactgaggaacgaagttcagttgatttcagtttatagtatttgaaaaagtctttaattgtaactgatatttatattatcataaaaggtactgtagctgtctttttaacctaccatgtaaagtagatagagcaaatagaacattacaacatgtgacatatagtgatactcggacacattgtaacatagcttagtttcagctgacaaaacaaaaaaaatacatactacactatttatcagtaaactaatattacatagtaaaagcatctcgttaaatgtttaaggaggtttaaaaaacacattaaaccacatactactgcgtttctccacagtatccacggagcgtcccagtatatccgagtttttattagaagagcgatttaagtagttgctttaagaagatacactctcctatcctaaaaaggtttactcataattattggtgggtacctctttaagtggttgaactttctgctatacgtcgttttttctatctgttgttaggttggaatcgcgtaaacaaattaaaaaaagcaacttcgaaaatctatcactgggcacttttggactgggattgctagtacgtgtacttgtattttttattcttatttatttctttttcaggacccacatcacagtacaaaattagtcacttcaaattaatttgctcgtaatattcccaggtattcatttactgtctttttttttgggtatcttgtttcattttcaacttcattcaatcttcaaaaaaatggaatttcctatcgatgatgaggaattgctagatgagcgaaataaacttctccaaatttgcaatatggacgagcaaacaatgttctacaagtgggagtcctggtgtttgcaacgaggaaatacaccaaaactcgaccttgacacattcaaggcctttgctaaagacatgaaatttcaaatggagaggcaggtaaaagccacacttaaacagaatcctgaaagaaaatcgataaagcaaatcccgggaatgaatattgatagcatgtgcgtacattagcaaatggttttaactaacaaatatctagactaggtctaccagtgaagaccaccgcatcaggcgactcgttgatgcaagagtctaaaccatctaccgaaactttcgaattgaattccagtgacgctggaagggttttggaagttttaaataaagaattaaaaattgtaacttcaaaaccttcagctccatccaagctggttatcgtagcgaattttgatctcaaggcatttaattacaggatcatgtatcaaaagctttatgattcttctgaagttctggatgatcgcattgagctttttagtgcattaacttgcagaaaatacaacataagtgatgaagatttggcaaatcctagcgaacttactcaagaacccgttgtagttgtaggacgaattgttgtcgaaagtaccaatttaggtggaagactcaaccaaaatagcattttacttgaaagttcaagacgtctaggcgctggtgttcgagttcgtttgaaggtggatgatctaccaagttactcaatatttcctggtcaaattgtttcagttaaaggatccaatcctagcggtaacatgtttatcgccaaggaaatccttcctatacctcctttgccgttcccaagttcatctaaacaggagcacgctacctttgttgctaatacaaataatcagccaatttctatatatattgcatctggaccttggtctctccgtgatgatctctctttttcccctttaaaatcaatgatttcatatgtaaataaaaatcctgttgacttggttattctatgtggtccattcttggatattaatcatatactaatacgtaccggaaacattacaggaacgtctgcgacttctttggaagagttgtttaaagagcgtgtcacacccatattaagccagctaacttgtccttgtattttaattcctcacatcaatgatgctgcttcagatcatcctgcatggccacaggatgcatttaatcgggtggccttaggtcttccatctgtatgttaagttgtataataatttttattgaccaatccatagaacttcaaatgcttcccgaatccttgcatgttttccattaatgatgtcgtctttggtgtgtcaaccaacgatatactccttcacacatctagagaagagttatttcgtctaccttctcatggtaacttatttgcacgtttggtttctcacgtacttcaccaaaggcatttttatcccttattccctggaggttctcttgaaaagtgcaacccttcaaacttagatatcgcacatcttaaacttggtgaattcctaaatactatgccggacatactaattttaccaagtgatttacgttatttcgtaaaggtatgttaattttctactttgttttaactaatgttatagaacgttgaaaacgttgtatcattgaatcctggtaaagcgaccaaagggattaatttgggcacttttgcaaaattaactatcgcgccattagagctcggggataatggttcttctaatcattattcacatcgtgtatggcttcgaaccaaggcagaaattttaaaactatgataattatactctctttttctgcggaatttattgaaaatataaaaaattcagcgttaaatatcattggttatcattatttatgtagatgtctaccatagaccgttagaattaattaacttttcagctttcattttctatctatcgctattttggttttcttcaaattttgtttgcaaaattactcatatgtttatgttgttaatttaaccattttcctcaaatgtctaagacaatctctgatatatctcaaatcgctactcgcgaacttttagtcgttgttttatagttgaatgagtattccttttatactgtagtatttgaatgttcaacattttttcgatttggactctagtcttggtgtttcacatctcaacctacttagtcactacagttgacctccaacatacataggggaagtagtgcaaatgcctgttattcctccagaaaagcttgtgtccttacaaaaaaatcaggaaaatattcgtaattttacattacttgctcatgtagatcatggaaaggtatgaattttgcaattttaaacttttttgaatagttgctaatgattaattaaagacaacccttgcagacagtttactagcttcgaatggaatcatatctagcaaacttgctggtactgttcgttttcttgattttcgcgaagatgaaattacgagaggtattactatgaagtctagcgccatttcattgttttttaaagttataagccaaaatgatgaaaaaagagttgaaaaagattacctgattaatcttatcgattctcctggtcatgttgatttcagttctgaagtatcttcggcctcaaggctttgcgatggtgcatttgttttagtagacgcagttgagggtgtttgtagtcaaacaattactgtccttagacaagcatggatagaccgtataaaggtgattttagtcattaacaaaatggatcgtttgattactgaactgaaactgtctcctattgaagctcattatcatttgcttcgacttgttgaacaagtaaatgctgtcattggcaccttttatactggtgagcttatgcaattagctgataacgacgaagtcatcagtgatgaaggtatatatttcgcacctgaacagggaaacgttgtgtttgctagtgcatacgatggctgggcattttgtttggaccaattttcagaattttacgaaaaaaagcttggattaaaacaaaaagcacttacaaaatgtctctggggtgattattatctagaccctaaaactaaaagagttcttcagcccaaacatcttcaaggccgacggttaaaaccaatgtttgtacaatttgttctcgaaaacctctgggctgtttatgaatcagctgtgagcaataggaaccttgaaaacattgagaaaatcattaaggcattaaacattaaagttcttccccgtgacatcaaatccaaagaccctagaaatttgctacttgcgatttttcaacagtggttgccactatcaactgcaattttgttaacagcgattagggaaattccttctcctattaacgcccaagcgaatcgagctaggaaagttttgagttcaactcctcattacgaaatgatagatccagatattacactggctatggaaagttgtgacgctagtaaggaacagcctgttttggtatacataagtaaaatggtagctttttctgaaagagatcttcctaatcatcgtcgcaaacaacttagtgctgaggagatgaaattgatacgttcaaaattatctgaatcaattgagagcggcataaataccatttctattgaggaaaacgtttcttctaccaactctgacaatttagaaggtagcacaactgacatggacgatgataaggacattttaattggctttgctaggatatacagtggcacaatttcagttggacaggaagtatatgtttatggtccaaaatatgatccagtcaatcctgaaaaacatattaccaaggtaacggttgagtcattatatttaatgatgggacaggagctagtttatttagagacagttcccgctggtaacgttttcgcaatcggtggccttgccggaacggttttgagaacagcaacactatgctcatctccaaatggtcctaatttagtgggcgtaactcagcaaatggagcccattgtgcgggtcgctttagagcctgttcgtccatttgagatgaacaagttagtgactggccttgacatgcttaatcaagccgatccatgtgttcaaatagccgttgaagaaaatggagagcatgtaattatgtgtgccggagagattcatttggaaagatgtttaaaagaccttagggaacggtttgcaaaaattgaaatacaagcatctcagccacttgtgccatatcgggaaactaccatagctacacccgacttattagcaaaaaataaagaactgagtattggctttgtcactgcaacgttaccagttggcggagttacgattggaattacagtaacacctctttctgggtctgtcgtagattttctgctgaagcactctaaaacaattgaaaatgttagcagcaatttttcaaagaaaaatagaaacgttgttgtctcggaatctttaacaaaaagtatggaggaagtgttgactcctgagaagttttatgaaaggctttccaagcttttagaggaagagaactctgacttaggcgagctgaaaaatcatttggataggtaggttatactagtgttctattggttgattactaacaatactagtatcattgcgtttggccccaaacgagtgggtcctaatatactttttgacaaaaccaagaagatgagagattttcgacgacaaagcgatgaaacaaaattaataccctcagacctttctgaatatgtagttactgcatttcaactaataacgcaccagggaccattgtgtgctgaacccgttcaaggcatttgtgtgtcaatcgatcagtttgacatatctgatgactcggaagatagtaagttacttaccatcaataatccccaaatccccggtcaagttatttcggtagtgaaagagtctattagacatggatttttaggttggtcaccgagacttatgctagccatgtattcttgcgatgttcaggccacatctgaagtcttgggtagggtatatggtgttgtttcgaagcgacgaggacgagtaattgatgaagaaatgaaggaagggactccattttttattgtaaaagccttgattccagttgttgaatcctttggattcgctgtagaaattttgaaaaggacatctggtgctgcctatcctcaattaatcttccatggttttgagatgctagacgagaatcccttttgggttccaactactgaggaggaattggaagatttaggcgagttagccgatcgcgaaaatattgctaagcgctatatgctgaacgttcgaaaaaggaaaggcttattggtagagcaaaagattgttgaaaaggcagagaagcagaggacactgaagcattaaagatagtacttgattccaatttctttaggaaaacgaaaagattgtaatttgatgacaatgacctggttagatggaggtaatgtttttttttttttttttgttacattgttgaggtagctgtgattttgagttaagtgtttcatgaactatgggactaagattagaagtctataagatgaatagtgtaaaacgcacatgcaagattctttaggcttctttttgttatgttttaaattgttaatacaaattcaaatttccaaaaaataccgatgttgtgggatatgcataatacaaataatgatatactctactgcgtaatcgctagaaggtgatagattacagacgcgacgcgccaaaacacaaacacatctttgtactaattcaaattctagtattttgaaaactattcgccttaatgttttttgacggatggaaaatgcaaaagattttataggagaaacaataaaggagaatggattacttaccattgaagatgatggtagcagtagttcagatgaagaagctactttaaaacgacgattggcaggcccttctgttctcaagtcaggacaggaaaatgttaatcaaaaaaagattaacgagataatttacgaagcttccaaaggaagtaagttttttgaagccgaacaaaaacgagaccgagaacttcgtttaagaatagaaaaggttcaagttgaggtagaaaaataccaatcaaaattaaggtttgataaagcgtttcaaagagagtggaccattagacaagaaagtgtggatactactgttgaggattttagggctaaacgagatttgacccaaataattgttcatgttgattgtgatgcgttttatgcatcaatagaggaacttaagaatccaaaacttaagtctttaccaatggcagtcgggaagagtgttttgtgtaagtattcgaatctgactgaaactaatgctgaataaggtactgctaattatgtggccagaaagtttggagttcgatcagcgatgccagaatttattgctagaaagatttgtcctgatctagttgtaattccgttaaatctttctgaatatgcaataaaatctaaagaaattcagaatgtgcttgctcagtatgattcgaatttgtgtcctgcaagcattgatgaattttatatgaacttgacttcacatttacgtctccaagagcttgcatttactgtagaaaacataacgatggtggttgagaaaatcaggaaacaagtgcatgaagaaacaggagttacagtcagttgtggtattgcagcaaacaagttgttagccaaaattgcaagcaataagagaaaaccaaataatcagttttttatcccatttgacgagattgggatttcaaaattcatgaatgacttgcctgttagagaggtaagcagtctttctatatctggttaagcattctttaacattacaggtttctggtattggtagagttttagagcagcaattacttggtttggaaattaagacgtgtggggatattcaaagaaatttggtgattttatcttatatctttttacctaaaagtttccaaaacttgttgagatgtagctatggatttggaactacaattttagacgaatacggtgagagcaaacgaaaaacaattgggtctgaagctacattttccagcaatcttagttctccgtcaataatcgagtacaagctcagacttcttgtacaaaatgtatctgaaaatttacaaaagcgcggattagtcacaaactcgatcgctataaagtataaaacaagcgaatttcaagttcataccaagcaaaagagcataggtcaattcattcattcagaatctgatttattgaaaccagctttgcaattgttgcgtcaatcttaccctatgactattcgtttattaggagtcagagcaacaaagctggttagtaaatcgcgttgtttggccatgcaacttgtaagtcaagcaaatatactgctagcaatatgctaattattactagaaattccaaagccagaataccgttccttgtcccgtttgccagaaaaatattgaaaacgaattaggtatactgaaccaacatgtcgacctttgcttaaatgtcgaaacagttaaatccttgatcaataccgatcatactgcaaatcctacaatcaaaaaaagaaaatcaaacacattagacacatatttcttggaataaaatttattaatcttgaccttaaagcaacattaaataagttttggattgcgaatcattgcgcaactagcttatggtaaaagtatttgacagtttgtatagaccaagtaaaacttttagagaaagaatgtcaaagacaactatttttagataaagtaaccatgctattttacaaaataacattgcggtactgaaaaatattacataaatgtcaacgtcaattgtaaagtcatcgtcaaactcaaagattgtaaggataggccgatttaaagacttttagcagcgattccgcacatgattgcgacgccagcagcgtatgcgccaaattggaagatggacaaagaagtccagtaaataaacaacaggatttctgcaacggccaaggaggcaaagccaaacgttctagcaaatgaagatgatgacacagagtaaacatttgattttggtaacaatttctgccacacaccgagcaaaccgattaaactaaccactaccgaaacagaaaagcaaatacttagaaaataatttgcccttttaggagggggagaaaatgtatgaagaattacttctttaggacttaattcgtccaaaggagaaaattccgctttatggtacaaagaaggaggcacattaatggaaagttgacccaaaggaagtgaaaaaggaatggtttcaccaaaagaagcaacaagtagtttagccgtaagagttgaatcacttcgaagtaaagaagtgggaatatcaaatagacgctataaggttagtaaattaatcgctaagagaagtattcaaagtgagaattcttagattaaattaacattctaagctgcaattcaacctttcccagcgtaccaattctaatgaagcgacgcctccttgcgataccgaagcaggatagatcacagcgagagtcgggtgttcagtatcgcttagtaaaagatgtgcttgatgaggaatagctccagtaccatttaatatacaggtaaacttcagatttagagtctcatcgcctgtaagttcatagacagtggaactttggatttggctgaacctaaagagataagagagttagaatcttcagttttatagaatagattggaactagttttcgaaaacggtatttcgctaacaatatacctactttaaatcataagcattttcagattctaaatcttgagaagacaactgtagagttccttcttccacattccaagaggcacacaaagctcttgcgaataaaagaaatccagcaattaaaaaaaatcctttcattataaataaaaactgcactctttacctagaaaacgataacctcctctagtaggtgttgagcgaatatgatggatgtaggagagactactttaacgtgtagcctaattagtgccgaacaacgccatcactgtaattcattgcgagtaacgcactgagtttcgctaaactacactacatagcaagcaatggagaattaaaagtttcttaaaaaaagattcattgagtaattaaaagatttgaatgaatgaatatttaaaaagaaaaaacaagtgtgattgggtatatgataagttccagtaagcgtttttagattttattaattgtttgatattcagtttacagcattgctgtttttgacttagaaaattcatcatatgtcaccatcagtaaattcttggtcataataaataaaaaatttcaatgcccggtgcatgtttccaacatcacagaacctttcaagcaatgcacttgctcatccatttcgtcaggaaatgaaatcatgcaataaaaatacatctgaaatactctaaacacatcatgatttgtttggtaaatcacaattatatagatgcttctttccattgcacattcttgtagagaagtttcgtgagaaaagcgcctttataaatcaatagtaaagttagcaatataattaggcttcattttcagggttcatctcacgtaacggaatagcagtattgctgctcgcgtactgtctggcctcataacctaatgataattagcatacacaattaaaaagatatcattttaaatttacccatctttctgatcaagttgaccctgattgatccaggttttactgtattgttaatataaataagtgtttagtcaacaacaaacctgtttcagcaataaaaacaaggatgctcaaatacaacaaagataatgtgatcagccaaagaacatttcaatccccatctgtcgccaaaaatgtatcttaaattcattcttggtgatctgacaagtatgttaaataaaaagacttcactgaaagccataggcatgttttcccacttctttaaaaagtgcttgattccttttccgcaagccttgacacattgtgccaagaaaattgcagtcacctttacacatttcgccaaggaaattacagttactttaactgccttggtccaagtttcatagaagtctgatgagttagtgactgaaggtaagattaaccccattgtctcacttacaagtcaagaatattaaagccaaagtgcaaacaagacaccaaaatccaaataatgtccattccgctgcaccataatttttaaaaaaagcgtccttatactttagataacaaactgctggagcattgaatagaatgattgaagtgaatgatattagcagttttatcaacaaaggggaagaattatctgtcgacctggaaggattgttttctctatgtgtgttaggagaattgcttaaacgtgcatgatctgtttaaattaatatgattgaaagactttagttaagaaaaagcatgcatcaaagtgtgtgcattgcatggccaactgtaaacaatgaccaaagcatgcaatttgactacgatggcaagcttcaactttcaattgaataattcctttcttattatttacaattcttacctgaatatggaggcaatgtactttcctcctctgaatcatattctgggaggggtcctttttccaaatcaaatttcatgatctatcttcaattcatcttcttcatctatagaacttttcaaggaagtgtaattattcttcataataataaaatcattctttatttaataaaatacatgcgcgaattaattgctatgattgcgacaaaccaaacagcgaaatcaagaatattcactctgtagtccaattccaatcgctttaaagactttttaacaaaataataaaatcgttcaaacaaatttccaactaattccttcaaacaatggcataaaaaaagaagaacgaaaaaactgaacgaggcagtggattgcttctgacacatttattttgtcactgccttttttattcaccccaacttagctttccttaaatgtaagctacgcagtttggtatctactttaacgataacatagaactgcggtaatttttccttgttaacttattacaatacacaggtagtataagtagcaactgagtttaggtattgtactatcaaattgtattgttatttattacaaatacaacttataattgtgtaaggaatgaggtttagcagtaactctatttatgttgtttagatgatttggattttaatagattattgttaaaattaatatcaacatcgtatcatctgcggtgcgatatgtaaatggaacatgtgatatatagtgatcctcaacgtatggtattataacgtagtgtagtattgctgacatagcatactatggtatgtttcactgtggcacatgtaagagtactaggtagtagttaccatttaagaattgcagataaatttcattttatttatataggtccctgacaaggagtaattgaaatattataaattagtgacaactatacctcgcccctcggtttgttaatcattacttcagtgatggtaactttatagcgcctatataagatacctaaaaccaatattacctgtaaatgtatatatatgatagtagtagtagttcacaaggaaaatgtaacgccgttctatgtgttgttataaagcagatacctaactgcatagctcaaatgtaccatctaatattatgtatatttaccttatcgagagttttacaaaaatatcgcgtgctttatgagttaaaaaaatctataatgttattactattttaaatgattcatatcaagaacagcaagcttctttttgctggctccacatcattctgctagcgatacgaacgaagatttataaagagtactgcaaactgaagctattgatcatggcacgtgtatatcagtaatgaaaccaaatgaactctcgatagtttaaaaggcattcacatacattgttaatacatggtgtactacgttgatatgatacttcggtaaaatcaatgtgcatactaaacataacaacagaattgcaaataaaataatggattgttttggtgcgatttattatttggaatattaagtctgaggatgtcgagcttacaagttataattggtgatctctatcaactcattgtgtggtacagtgtctaattaaatgccaacagaattatcattctcctttcatggatccttttccgtgtatataggaaaatcgcttaaatgttcatgttgaacgcttaagatgtatacagtatacaaaattttttatgtttatttttcctacttctttctaaagttgtattgaatcattgcattgaagaaatatcaataaaaatcaatcaagtgactgaattctacaattactccatagtgtcttatttattgaataaatgaatatttacgtaccaaaataattaatatgcatgtgtgcaataatagaagcaaaattattgattgtttacaattcaaatttagtcggcatttaacctttccttcgcttaaaaatattattcgagttacattatttttttgaatcacatggctagatgttagactttctgcagcgagcaggaaaagaaggatatatcattatgcttaacagaataacaccagcatcaaataaaagaagatatttctatccggtaattgcaatttactaaattaatagagatttaattttcttagaacagtatggcttatatagtgtaaaatcccactgtttctgccaaaggtccttctactgtacatggacgtgtatctaaagcgcgtatgggctatcctgtaaataatacagagagaattaggtataaacgatactgatgttaattatttttgttggctccaaaggacgatcatatttatctgtttcaccttgctcaatcctgtgcacaacatccagaccagcatatgctctcgcaaaaatagtatgcttgccatctaaccatggggttaaatcggtcgtaataaaaaactgagaaccattagtgttaggaccagaatttgccatagaaacagtaaaaggtcggtcatgtttcagattcggtgaaatctcatcctcaaaatcctttttccaaatagattcaccacccgtaccatcacccaaagggtctcccccttgtatcatgaaatttttaataattctgtgaaaaatcgtattatcatagtatccattttcggcatgggttgtgaagttttggacagctttaggtgcttcttctgggtataactttatactaatgtcgccctgagttgtatgaataattgccgctttccccagaagaatgttcccattttcttgtcgaccctcattatttgtaacagggagcacctgttcattgtaaacatcacgatcagaaagcgtaaacttcgttgacatgttactgaataaataaaatctttgctttttccaagcggtagcaaaaagagtagggtctttctgaaaactctcttctaccaagggattgttgcttgcaataacgtctaaagaaggtaaattgctctttttgggagcttgttgatacagagacaatcgtgtaaatcgtactgcttcatcttttccataaatacggacaacggtaccattatcaatgctgacaacctttatcccaacgatacttccatataataaatatttttcgctttcatcaaaaatagcagtcgtacctacagtaagaccgtgtttctcgatatcacgctcaatagctattcttcgcccaagctcaacatgactcatgtaataagaagattctgtatcttctttttcgaataatgcctctaccttctttgcagcattagaagggttctcgtccaactcaaggatcgcacggccacttttggtatcaaaaactcgaactttgcaatccggatatgaaatcgtggaccaaaagttttcaaaatgactcacttctaaactcgtcggtacacttttttgctttttaaaaatgtaaagatccgtttgacttttcatgttaaacaactcagctgtgtcaggcttttgaaacggttcttctggagaccaatattctaccatgcctccgatgtcaatgctcaaaaaacaatctaaagtacttaagtatcgcaaacaatgtacaggagcggtgtgctttttaacggtatataaaacttcgccgtccccaccactttcaaaaaagaatattaaaggggattcagcgctagagacagcaattaatgaagtttttagggaagggctattaaagcagcagattgcttttggaaggaattctaaatcaataatattcactaagtcaatgctttcaacgtcaaatacttttaacgatttatcatctgcaccagtaataaataatctctcatcctgacttaactcagctgaaagaagcattgcattatgagcatgaaactctttaatgtattccacaccgtttggtgttttgtgccaaaatttgacatatccatcataactgacactcaaaatgtagttgctcttagttggaaaacatttgtaaatttctgcattatgcatatatgatttcgtataccttggagcatcaggaagattgtgtagaaatacttgatcatgattttctaatagtacaaagcatcagcatcatcgtactcaaatcaatcaaaatttacttacgttttattcgctttttgggcaaaccaacaggtgaaacatcacggtcaactggtgaagcaccatccatcatcagcgtagcggttgactgctaggctggtggatttcatatataatacaaaagggtgacgccataacaaggttgaaagcgaagagtcgattttttcatttttatttgcttaaagtatactaatgctttagatttgtctagtcttacttcccacgtccgtattccttgcattaagttctggctcaaaaagctttgaacgaaaatctctatataggtttgaaaggtgctcaaactcttccgagtttaagcttggactatttttcttcaaagcttccatgagcatataatcttctattacgacactttttgaatcactcatactttgcatattttgattatagcgactttcaggtggaagagcaagcattgacgcattcctttttgactcagtcgtcaagttagtgaaggaacttgtggtttgactggggtccactgcgtttatacttacacgtttcaatagtttatgaacagcaatcaaatgcgcatcgtacagaagtgacgataagtcagcataagtataaccatctgttaaagttgacaatttctttaacatggccgcattttcaatatggaatcggtttgccaatttctgtaaaacttcaagtctttcttcttcgttaggcaaatcacagaatatcagcttatcgagacgaccaggacgtaataatgcaggatcaatcatatcaggcctagtagtagctgccacaatgtaaacaccatctaagctctcagctccatccatttgtgtaagtatttgattaacaactctgtccgtaactccagtactatcttgtcctcttctgggtgctactgaatcaaattcgtcaaaaaacaaaacacacggcttggccatttgagctctactgaacaaatctcgaacaccctgctccgatttcccaatatacttatccaaaagttcgggcccttttatgcttataaactgaactggaaaagtacttgaaattgcggaagccaaatacgttttgccgcacccgggataaccaaaaagtagaattcccgtgggaaggcgaagcctacattgtttatatatgagagagtatttaacaggagactctattatatctctcacagcttctttcgcttcttgcatgcccgcaatatcaatccaccgaatactggacttgacaaatttagctttccgaagctgcaatgggacaaaatcttttaaggtcttctcaatcaatcccttattcattaaatgttttggcccattttgtatcttttcaacaaaagcttcagacagtaatcgtttcacgaataaaactaaatctgtcatcaggtagccttccgttttaactgaaataaattcaatactatccatagttatatcagagaaattttcttgaaagatagttgttaaaatttctttcctcctagtcacagcaagcgatggtagagctatttttatttgaaaaagcaaaggcaaaactaaattttctgagaaagttaaaaattcctccccaaatccaatgaaaattatttttctttttctttttaaattaattatttgatgttgcaaaaatgctatttctcgctcttccacaaatccaagctccccattttcatttgaggaagatataagacaatgaacatcatctagataaattattgagggttcgtacctctctgcttgtataaatacattgttccaaaagctttggaatttggcaaaagatgatcgatcgatttctgaacaagatacaatcatctggaaatagattgagttaagagaataataatcaaacaatgagtgaactaaatttgattttccacaacctttgggtccattgatatagatattttggtgcaagaatacagcatttcgtacttgcgcaaattcatgcggaaacggctgcatagacaaacgaggactattatttcttatacctgcatttactgggacgtttgtatcacttgtaatttttatatcttgaattggatttttaacaacaccactgagtccgctaacagaataagaaactgctatgtcaacaagttttaaagtcatgccgtccattaaatagctgttttttagcttggcagccaccagctcagaactcaagttgctttctggtggaagacccttttgctctagaataaattttgaggaagagggagggttatgagccttccatatttggaatttgaaacctgtttttatgctgtatgacaaagctaagctctttgagataaaaaaatgaccaggtatttgaaaagggcacgatacacattgacatacaattgtggattttaaatttccaccatccatatatactacatctggcctatccggaaaatttagaggtagaaatacgcaaagagctggtgaatcagcagtaacgctgtcaggcaacaagcggttttctacaacacatctaagattaacttttctattttctttaacttcaatggcagatgtattgggtttgggagtaatcaacacttcagtagttcgtaacaggcgcccgcataaagaactgggaatcaatttaagaggctggaattggataaatgtaccggaaggaagataaataataaatctctcggtggtagctacacgatattgtactaaaagattttcttccagccaagctgcattgcgttcagcgatttcccaatcattagaggtgacaggttcaatttctagctgctcaatttcatgagtacaatcgattattgataaatttatctaagagattagtaaaaacatttcattgctgacaaatatttttacctcttgattttctgctaatttcagagtatgggcgtaggtagaatcgatctcaaatgaaaattgtgacggaattccagaaatcccaaaataaaatgttttctttatatcgtttttacaaactacagcctgaacggcgtagttttggacaggttcagagatagattccaacagcaattccggaacattaaccagacatgatcttagacttttatacgaaacaatacaccgcatatactatttagaagtataattatatagtttgaaataatcaactcaacgttactcgtattcaccgagtaaaacttattaacagtagtatgttgttgctaaagtaaacttatcttgaggacgaaaactatgtagtagcctccttgcacactcaacaactatggtcgaagatatatattttttttttgtcaatttattaaaggaataaatgggttggagtgccaaatttttttgtgaaaaaaatttcaaaattcaaatttacaaaaagattaatagtaacaataattgaaatttaagcatcattataatctgttcttctaataagaacgtgacagaccctaaaactccttcaaatacgtttatggattttatcgtatttttttataatttacatttggtctgaatttcatgatgagtttaaacaatatcagttccattattaagctaaaaagtaaatactaaagcataggaaaagtttattgtgaaatgttgtctatttcaatctcatcctttgaacgcctcaactattttttcctcttgttaacacattgctatacggatgtactaacgaattgtatcgtatgaaacaaaatagttaatattacaaaaatctttatgttaaaacatagggcttacagcctctccattagaacatcacttacaaaaatatttctgaattctaataatcagtgatttttgtgtgtaatgacaaaataaatcagtatgcattcgactcgttccaaaataaggcgcctaacagtaattaaatctcaatatacatcactttctttgatgctgttcaaacttagaagctagggcatcgattttcttgttttgccaagtccaagaaggatacaaaaattgacgaaggtcataacgattgtcatctactccatacgtttcagcatgataactgggagtcaaagtagtcattttgtgacgattgattccataatagtgaaaaaatcgcttaaccttttcagcaaccttataaagttagcgagcagtcattacttctaaaatgaataatgtcacttacctgacttggtgataagcgatctccccattgatgcattaattgagtgaacatgctataaggtccacatttcgaaatttttcgtaatctaccaaaaacgctgagttcagcataagtcattcccatatcagcttcatcgctttgaacataactttcagtggtaggttcgagttcagcagtgggcgtcgcgtccaaaaattcctgaaggattggtaaatctaaggcctccttggcataacgtaaaaatgattttaaatcggttttagaaatacctcctatgggattaatgtcggcactggaacaatcatatttggtcaaatagccgcgaagacttgtaaatttgtcagtaaataaaataaaattataatagaaaagcataccactcatccacattggaacttcctagcaccaaaagagatcccgaatacccacgaacccatggcaacagttgagcaaatagatatcctagcaacattcgtgaccgagcctgaatgttctgtaacgccaaattttcagcatttgttcctccgtttgatctaaattgaggggttttgccagttactagtgcgaataatttaacaacagcactggtcatagtgtcgatgttcacgtctgtatgataggacccaatcaaagaagacagttctttcgctcgactccttgtttctttagaggaatgttcagaacccataaacgcagtataaaataagtggtttaaaagctttttaggatcagtagaactataggatggatcaccaacgattcttctaacatctgacaaaacctgtgcatctattgaaggtcagtaattaggatgcaaaagtttatcgttacttaccatcttcttccatggctttgcaaacaattctgcacatgctataaaccaaaacagcagtagaacaagaatccaaaccaccgctcaaaggcaaaaagaatccagctgcatgagatctcctcaaataatcccaaagccagcaagccggaccaaaagtgatttcttcctcaggtaaaggaatagtaacttcaattggatcagttggttttctgtaaatatcatagtcttgttgatagctactgagactaaaattgacatgaatacgttcataagatggtctagtgacaccttggattccatgtgatggttggaaacgatacgaacgaacagtatcaacgtccacggtagctgaaataacctcaacatccttcaaggagaactggtgtccctgggctagcatttttccattcgcaaagatcattgatgaaccgtcatagtagagacgaccaccatcacaacccctctgattagaatatagataaatcccaccgcatttttccgtagcattttgtatcaagtttactcttgttgttagtttacgaagttcgtggtgggatcctgacgcattgataaatatctctacaccgtccaaagccatatcaatgtgaggactatttggagtaaacagctcttcgcaggtttccacaccaacaacggtttcattgcattgaagaatggcatctccaataggaacggttgtttggtttaaagactttgcaacaaaagtaggcaagtaatgagtttccacaactcttggccttaaccagggagtaaaccaacgagactcacgaaaatttccatcgtcacaaagccaaatcttgggacggattaacaagatttttccatttagagctagaatacggcagttgtgacgcatggctttgtgcattacaggcataccgatgtcaaggagaatgtcttggcaatcaggatcgtgaataatcgaacataacatttcccaactatggtagtaagtgtcactttctagaaaatgatcttcacagccatagcctctaatgcgtttgttaatagaaagttacagtgcataaaattaatatcaaggtaaaatacaagtttcaatattgcaagaagatgaataaactcaaccgaagtcgcactcagtaaacttgaccatggctatccttcatgaagtttaaactttagcttattcactgatacacttgcaacatttaaatccatttctattacatacgtgacttctaattctggaccaacacgaaggcttgcgttttgtcttttcgcctctttgatggaatcaatgatgcgtagacggtttccctcaaagtccattgcccactggttcagctgactacagaagttagatcattgagacgaaaaatgattatagcataccaagatgcgatggttacatatcgttccataatgaactgaatgcttaacttgaggtttattcccaaacaagtaatttaacttataatgtttttttcgtactataaaagttccaactatgagtgaagatcgaagtttctattcaaatgtctattcacggttatggcagtaagtaagagcaggaggtagttgtcatagtagagtcaagtgtaaataaagggttcgcatcatatagcaaaaatgccagtttccctaagtaagaaaaagaaaatttaaataattttaaagaccctctctgatattagtaaaaagaaccttaatacttcttatgcaaattttggcgactcttctaactacatgtgtattaattgtacattactacatagcttaaaaattgatttataaaatcagaataattgtaatttttatttgatattgcaatacaaattctagttttagcgatatatcttctcaagtgaagtcatttctgggacttcctttaataaaaaaatttgcctatctttttcagatatacgagctaataaatgaaattttttgatttaaagtctgtctggttttattagtgttactcgcttataattacaggttttttgatgattatagagcaagctgatatctggaatacgcacaacagtaattacatttttttaatagtacaaaattgttttaattttatccttgaaaatatttcatgatttaattaatatacttagttcttggagcatataatcgaaattacttagcttaaagaagaagaagcaaagcgacagatgccataatggttgatactcattttttaactccccttcagttacttcttgttgcaaattatagacagatgattcttcagctgctcaataaatttaatagttttagtgattgcaaagatcagtcttcttttttgaaagggtattaattagaattgacaaaagatttcaggtttattattacaatgaaacaactttcttcatcttcttgggcttttttctcctaaatttcgtccaagtactaaattttaggtaaatttctatcagtgcgcttaaaccaactttaataacttaatttgtacctatcttcgacatggtgatgagaattgcaagttcaagatttcgagcagaattaccctctataggccttttatgttgctaaaattataacataagtacttttgcacctaatcgtatcatcaatcatctttgatgaattttcttgcctgcaaacctcaaaagcgatagaagaacaaaagaatcagttttatctccaactgctatgtttagattctctattataatgcgacgatagatacaaatttacaagataaataattttacattacgaatatttgaagcaatctgcctctgtaagctcaactgtaaacttcatggtttaaggtgaaaaaagacatctttttttatatatcattatgtatacacacagtctgtccctatgaaactatcaatcgggattattaaccattgtttccgtttctcgatacaggatattgaaaattatctaacagttttgcttccttgggcactaagagaccttttactaaagaaaaacccatcaaatattagaccttgtagattagtaaaattaataaaaataagcatctctcttgaaaccatctcaagagataatctgcttctgcttgcgtattataaagttaccttcaatcatttcggcgtgtaaacaagtacctcatatcaataaccaaaagctcaactcgtttgtagttcataaagaaaaagaaaagaaaaggaaaccttgtttaaggattctacaaagatgtaattttctggcttgagatcatttactttcctagatttcaactttctgctgtataccaaccatttcctaactaccatccaacaaaagcacgtaattcccattcctaaagcgagagcaattaatgctcaaatgaggtttatacatgaaatagatattctcactcttattctttaattaattattaaatagggtggtttgtgagtttttttcaacaatattaagcttttcgtaagccacctttcggaactgcctttacaggctttaaaacttatattctatggatacaagttccaatgtttttcattatcaagtattgtggacgtctgataaagcaaaaaaagtaaaagtttggaaagatgggacaatgcgcttccacagcttcaataatcgtggaattctctacgattctgataaccgagtcgtagatgattttttccttaacaacaagagaattgttctggattctgaaattgaatttaatagaactattgtttacgttgagaatttacaaacaactactgaagcgaatattccacctataccgaggaaatcaaaattgagtgagacagggaagaggccagcttatttattaaaaccattccagcctccatttcactccgctaactcagatgtatctaacaattcaaatggtgctttatcgtcaaatatgttaaaaacacacgctcatcatacaaattcaacaaaatccacgatcttccggaacgcaaatttgcaatcttatggagtagatgactcagatattggtagtttgagatgttcaagtaagcatcaactgtcagtaacaccggaaatacaacccaaagctaagtttagaccaaactcatatctagcttcttctgttgaggaatctaatcgagctaacaatacctctccctatcccccatctaactcatccgtaactgcgctaccgaaaccttcgaaaattgcatatatccctgttttgtcaaaacccaagtcttttaatggcaccttggttgaagatcctgtagaagaatttggagaagacgacatagcttctgactttttttcttccccttctgccgatctcgaggcagatgattttaccactctaaataattcaaatgctggtcatttgttacaaaacctaagtaatgataacgtaagtgtctccgtgaaggcattagaaaatggaaatgaagaagtttctaataatcatgctcgatctcctcattcttcccgcgcttgtaataccataccttccaacaaaaacgatgggctaaatgatgatcatcaaagacaagattcttctgttgcagaacccagtcctacttctaaacgtctccgtttgactcgccttccgttacctctgcttcggaaacccacggggaaacgacaaaactttattaatatcacagttaccgacccctcaaaaaacttgtacgaaagaagtgtcaaaactgctgccgagctggcatcgcttcaaaatgtaacagaaacaactgataatgaaataccaaactctcctgattttctagatgcagcatcagaagaggatgaacacattccttcgctagattcgtcatctcttttaacacctttggctttgcccaacaaaaaagcctttcaacccgtgaagtttcgtgtaccgtctttttcatctcctttagttaaaccagcatcttcgtcctcgtttggtaggagtcactctcacttaggcacgtcccttcgctcaaacgaacttaatggatctagtgcttcttcttcaatctttctacaatccaacaatgcagtcaatcctaacgtttcaccttctactgtgcttgaacatgccaaacatccttccttggccaaacattcaggtgtatcgctgagaacaggcttgttgatatatcctaaatatgcaaatggttcgaaaagaaaagacggttttggagctacttctataatatcttcaggggaacattcgtcgttgcctaaaaactcgaaatccagaaatgtgtcggtattttctagcccttttaatgtcccttcgtttactgtttcttcttcggaccaagtccaaaagaaaaaaggaaatgttcctaatgctattgaaacggactcttctccttcggataccatttcatcctcgcctactgttcgagctgtaaatctctcacccagcaaaaaccaaaagcctccgaaaatacttaccaaaattccggatattttttctaaagcgggaaagaaatctcctattttaccaacttttcaagagtcttgttcgttacctattgagcctttttcgtcaaacattacggatttgccatttgtaaatacagtaacacttgcttcaacgagtagcaagatcaaaagggcaaagttaaaaatgctaaaatttaagcatgccatgactacacaaggacgcgatctcgattcggacgaagatggtgactttatttgaaattaatttttctttcgtacgttgaaacttctctctcaagccgactttgttacatataatttttaattcaaaaaacagtactgaattttgatttctggtttccttcatgtattattatcaacatttatttttccatagttcatttaggttttagctatacttatttagctcttttacatataattaattttttttttttaaacattagatttcagcttgtttttggtgttgttagtacaattctaggttttgattttcattttttagtagcacatacattgctttttcaaaaccttgagtttcttctttgaacctttgagcaaataagtatcagatttattcttttcttttaaaaaaccaactatttgggttattatgaaaatgttgtaaatattttaagttaaattatcttttgtagtcatttattttctatacatgtttaaatttttcagcactaaatagtgtctgttggtgagctccaaaaatcttgttaaagatgggtaaaaagcgaaaacagaccataaaaaatgactataatgaaaaaattacgaaaagaaaggtcaaaaataatttgactgatggaaaagctagagcgttaacggtttttgagtctttacctttagaagttttaagattaatatttttgttatccaataattcgaatttggcagtgacttctcgtagtttgagacaccgattatctttaaggaataatacgcctatcttcatgcctattgattttactctttcaatggtacccaaaagcatcattctctctattcaacgtggattgctacgcaggtattttacacttcaaatccttacaaaaattgacgaattagtcatttcggggtttgttaaaaaaagccctaatgaagatataaaagatggtcgagttatacatgcaggacacgaaggttttataccaaaacgtattcttttcttacccaatgcagaagatttcattgcagagctggaacatcgcaactttttgtttaaagcttcttctcttagaaatggttttctgctagcattaaaacaacggaacataccagttattcgtcaagtaggtaaaattgttactgaacgacttatttctatacctgatgatgaagttgagttttgtttcctcacctggttcgagtacacaatggagcaaaattcggtggaacttttggatatagtttttgggttttggaacaatataattgaaaaaagattttctaaatcttttattgactcttacctaacgagacttgtggatatagcaatttcaaaaaatgttacagagatcatgtactacttgattgaaaaaggtgcaattcctcaattacctaaccttttgaagcttttttaaatgcttaagtttgtaatcaaaattgctctagcttttatatcttattcatcatatcatttgcatctcgttctataaaataaattttgtattcgaggtatttaatattcatcttcacgttcctttttatatgcgttgtttccttttttcaaatagattcaataaaataactttttaaaaaccaaaattgttatttctttcgtttagtcaaaaacatacgagataacatttcaattttgagagggaataacatggaattattttacgcatgtgtgcatgttattaagctttttacatattttaaaattagtatgtacgcacattcatctgagctcgactctcaaagaattagctactcggttcctaagcttttcctgtagcttgtcaatttcttcgtttctaagggatctttccatacttctgtaattgactcggtagcacaagctcgtttttccagatttggcagtatactgatcaatcaagttaacagattctaccatatcttgacagacatcccgtatgatctcataaaaatcatttggattaaaatcattattgatccaaaatgcaatgtctttgaaacatgctgggtatttactaaaaggcttaaaagtgctaatcttgttaggcaagaattgcttcgagaatcgttcatccagtgaccaaaaaagccgaatatcaggaataccgtacaaaatcattgcgagacgttcaagaccaattccaaaagcccaaccaatgtagttatttaatcctgcacctttaagcagcctatcctggacgaccccacatcctaatatttcaagccattttcctttccagtcaatttctaactgaaacgagggcttggtaaaggggaaactgtcgtacgtccaacgataccgaacctgttcagctccggaagaaatagaaggagcaagtgataccaggtcatgaatcacggtggtcagagtatcctttaaatgttgggaaacaaattttgtctcttcaagtgaataaatatcttgcatgtcattatgagtttctaatgcagtagtttcatcatccaccattgacttaagagatggagaaagagctactttttttagatcatttttcatttttgcagtatcatttctgttccacaccaatgcaccttccatttgatgaaaaattggataatgactagaatccacttcatcgcgacggtatacatctgcggttattaagaaaccatttttcttaaatccttctttggccaagcgagagaactcttcaggttgatgagccgaggtatgggttcgaagacaagttttattgttcatatagtaagtatcggatttgcttctacttacatgtgtcttgggaaatcctaaagaatcaaaattcgtctctacagaaacaataggtgattctttttgaacattattcatttcgaatttttgaaattgctgttcgagaagttgtcgtagactgcatatgggatgaccttctttttgaaaaaggtttcgaccaatttttgagtgaatatgctctgggacattggaccaagaatctgtttggacttttcttttccaattgggaaaccttctcgaaaatagtttcgataaatgagagactcgatgagggaacattgatttcttaaataacacacttcactttttgtaatcaaacaatgataatttaaattagaacaacgaagctaactatttttaaaattaatatataataataatttaatagaattcaatcaatcggtcttaattgcgtcccatttgaaagtaaaaaaatgatagtacccaaatataggggttgtgccgttcttggatacaatgaacaaaggagtaaaattcgaatcgtttaattttcaagcagtggtttatagatttggtcagtttacaaatatttcattcattgtttttgcataaaaaaaatatatgctttaatttcaaaagccattatcactcaaatggatttcattacgacgaattgcaaattttatttccataagactcctgacataactttatttagaaagatagagcatcatactgtacataaagttgccaacttcaaaagaagtgcagaaaaattatcaaggactttcttgtaatcggtcatattagatcaagtatttaatagcttcactgtcctataagccgtacaatcgtaatgtaggctacaaaaaactcaacatttcaaataacatttcaaatcatcccgattttaaagaaagcagcattctgcgtatgaaaattcattcaaacccctaacaagtttgtcatctactaacattttactccaagaaaggctggggtttaaaaattaaataaaacggtttgaagcgtaacagcaaaactcgaactttgtacttaaagtacgatacaaaacttgactttagaaaaggaaatagattagacaacactaaaatcctccaacacgaaattagaaggtcctgaacgtaatgatactaagctcatgaaatcatgaaaagggagaaactattaaggtgttcactaaggaggggaggataattaaatgacttgattagtaatgaaagaaggagtttgcttatccccgataataaaaaattgagaaaactaccaacatactggacagacgttgttcttgagtaaaatgacaaatatcatgaaattaaaccagtctaaagtacaaggtatttttccatgcgtgactgaaaaaaactaggatgatggtttcaaaagattttgaatatgatccttttcttgagcagacatccaatcggatccttgtttagaagataaaatttgagcatacttaaggaacttctcgggacaattcttaaaatagttacatccagcaaaatggatacacaagtccccgtcgtcatagccccaaatattatcatcaaaatcatatgcgtttatagccttaagtgggacaacacctacatgtttatacacctggggatggtaaaataccatgtgagaaaacgcttgttgctcagcatatccctgaatatgatccaaatataagggttcaaaccacaaatcaacaatccagcggccaacttcgctattacgaataaaaagactgccagcgttaataccattaaaatcttgagagatgatgaaatgaacatccttagcatcctgatcctttggagttctaaatccatcggcggggatacctgcaccactcttatattcagcctccctagttaaaatggtattcaatcggtcgtgcttaagcacatggtcgacgacgttaagatctttgttcatgaccaacgcgtcatgatcaagccaccaaatccattcagcgtcaggatatttcttcatcgtatcttgaagcatagggaccttaacccagggcattaaatgacctgtaacacgagaagcataggcatcggcatctaagaattcgaatttgtaaccatggcgttcagcatattcacgacgatttttgataatggactgagcgaaaggatggagaggagagttagcatcattttgaaagttagagcccatcaaaatgacgattttagagttatccggatgaggatcagtggtagctaaagcatgaactacagaagtgacagttggagtagcagtgaaagtttcggttaaagtggcagtaacactaacaacttcactaatggtaacacgtaaagtatcagtttgggtactggttacggaggaaacgactggggtccaagtactcgtgtgttggtcgatgatctccttcatcttcgtttgaagcttggtatccatagctgaagtccaccaagctccacccaggattatggttgtaattacaacagcactaattaaataaggagcgaaccgcattgtcaaataatcaagagtaaactaataatatagaagagacaaaataaaataaaatgataaaggaacggagaatttccttagaaatgcaaaattaagcagtgaacgaaagataaaattagagaaaggatggtgatgagtgatatatgagagcttttaaaaagtagaaacaggaagggtaaaagaaccgacagtaggaatattagacgaaaatcaaagaagattctgtgcaataaaagagattgtatccaagagaatgtagaaaacctagatacgtgtggtgaattaaaaagaaaaaaaacccccccaagtgaaaatattctctcaactaagaaatctgttacaataagtaatggtaagaaaatccctgtagagaacctatatgaaaaggttcaatttgtaaataaatagtaacctaacgaacgaaggcaaaatatagcaaagtttagaaagaaaaagaagcgaaagaaggaagtaaacaccagtttgaagtatataactagtccaaaccaatgaaatgaatactttaatactacttggcaatgtaggtgttaaaaatcacttgaatctaattaaatccacgataaagattacaattcagtacttgtcaacgcaaaactaaaaagaaagcaaaaatcaaaaactcaagaaaaagtattgaaatttaaaaatgcctctggaaaccaaaaaaaagtgagattaccaaaagcgaaatgaacaaagcccgtataaacgaataaattagctcagtaaaaaatcctttaaaaccagtttttcgtcaaggtcttacaattagaatgttaacaaacacaaaaccaattgccttaagcaaaaaaaaattggtggtaagttaaggccaggtttaaatcgggggggaatgctaatatgtttctggagtgatggattaattgtctccttgttacctgccaaacgtgttacctgttattgaaaataaaaaaagggagcttgctaaacaattgtatttatagaagtcagtgacttgtgcatcgatgcaatcccgaatttccaaagaaaattagtttctacattctttggtaaaattctgcagtaaattcttgacgctttggtgcggtgatgttagtgtaaacaaagaaaaagtcaaatggctggtaaagccaatattacaaaacaacatggcaagtgctagaaataaaagtagtttaaagagatataatagtatcattcaggttttaaaagacatcgaaataatttttttttagtactgccgcttaatgggaaaaaattctattccaaacatgaaagacaataaaacttctaaaaaagatgaaaagagcaataaataaaaataaaacaataataaatctaagtaaagcataattcgtatttatttaaatatttttgtttcgattgaaaattactgatccaactaatttaaccctagagagcaaactagtaatgactgagcaagattcattgctttgtttctattaccatactgtatattatcggcttctttatattattaattaccttatagcaagttcctccaattatttagtcccatcccataccataccgattgtttaggaatttccaatcgatcgtttcgctaacttaactgcatgtaacttcattcaaattcaaagccaacaaacctttttcgatgtttaatggaacataggatcttttaccataaaactcaatgttttcccctttagttacactgctttacttctttatttttgtaaacggacaaaaataaatttgtcccctttacaactatcggaccgggtggaaaagaaaaaaaagggttccgcaaatcctaaactttcaaataaggattatacagaaaggaactatttcctccgaacattgcagaaaagagtcaatttgtctacttccatttaaaatttttttgcaatgctcactcagctttccaaagcttctttaacgtgctaattatgagagtgtgtaatgaaaaatcaaagaccatctaggttatcgttaaagataataagaaaccgagttatggttgctgtaaaaagatatcgctctggcatgcgatggttagtaaataatactggaatcaccgcaatcaaaagttttgctgcaaaaaaacgaactgaagaaactccctttaaatattacatttaaagagttgcttaaatgtattgcatctacaataagactggtaccgtccttggataaacaggtctacctatttatccgcttggtatactacagagatagcaaattgaataactggcatgtcatcagacagagagagtttgtatcaagctatattacaatggtttgtttatctttactattttaaaaactacattcatttcttgttaaagattgacacaaatattaacgcattttcttcctttgctttaatttactcaacacgttgttttagaacatggttcttataagcgttactgatgtagtgctgggatgcgtaatgtggttcagcataaaaatgaaggtggtcattatgtcgcaactgtgcgcatatgacacttaattgatgaatgtggaacagaaatgaaatcctgtaaaaatgacaaaacgaatgtgtcagacgaattgagctaattcagaaaaagccttattttccttttactttctactttgctttcaatataaagaagaagctggttgaacgtttaattcatactagctgggaagttaatattcttgtttacgttgttttgcttcaacaattttgattcttgcaattctgtgatctaatcttatatttttcgtccaaatgctaaaaatgagtggttcttatgctcccattgaggattctgcagatgaattgagtgtgcactcaggaaatgataatgaaattgatttggagaaaggtctccttcctaaatgtaatacgggcaatggaggaacaaccccttgttcaggtaagtattgtagttaataaggaaagatgataatttcaaaaaaaaaagaagtgattttgttttactacaaacagtacgctccccatcatttcgctgatgtgtacttttatattagtcgattcacctaaaatgtgtaaaacatacataccttattttttactatttcacttatgaactgcatgattctaatattttttttctttttcagaacctccacattatgattccgacgctgtggtcgaaatggatatgtatgaaaataatatatacatgcggacttttaaactaagaccttttgctaagagcggagtaactaattcttccaatgttgtgttccaaatgaaaacatatgaaaataatagacacatgcagacttttagactaagaccttttgctaagaacggagtaactaatggagtaaagcttgcacaatcattatttctgctgttaccgtttaattttattttcttcgcttgtttattttttaggaaagcttcattcactgacttctctctcatggggtggattttgtttggaatatggtgtttaacttgctttctttcatctttcattttgtatggtaagtgaggcatgagcttgccaatacgttcatttcccgttaacttaatagcatatcatgaaagttggacgaagttcgcccgagagcgatcgcaagagttctcgctaattctttttgggttgctttttccaggaattgtcaccatggtcgttttttatgcactatatatgcgtagtatgtatggctagttaaaaaataaactccttgactgtgagtaggagaagtttttttgtcactggacaagtaaaaattaccatatgcctcgatgagtgtgaaaggtcttgttcgaaatacatgtaaacaacactacgcaaaagagcttacgattgatgttgattatgggagagctctgcacttgttattttcttttgaaaacggcatgaacaataattttctggagccaaagaaaacagaaattttgtacaacatttgatcttctcttatatttcgagtttccttatttcctcacataaatggtttatcgtagtttttacagtttgtacaaaattataaggaaaacttataggtatctactgaactggtggttaattgcttcaagtactaaattacggttggctgttgtttcagggaaagatgttttgctcacagagattgaatagttggtaaataggatggctcttaagcagtgtcaaagcttagggagaaatcaaactagaaaaagaacatcctacctgttcaatatttttcaaaagcttgtaatgttaaagaagttacaactctttagacatacaatttgctcaatggcatttcgcgcttctactttctctaaaaaatacttcgacaattctaaaatatttagatttttaccaacgattttatttagaaatgaaatttgattattataaaatgctgaataattgttgcagccgatattcgtcatgattttgtggaacaaccaaaattactgagcttattagttaaattaagttcgatactattttttcttttcagcattatcttcgattcttgatgagaaaatctttgaccctatgcttcttccatcttactttgcaaacttccaattttttattgtttacaaaatagtgttgcataaggaggaaactatagtgacaattgtgataattagcagtttatcgctacccatgtgaattgactaacgcgatcttccctcttatcttccatgtattgtttacactgtcaaagcatttaagctgaactatagtttttgttggatcatatgcctgattttatttaatttgaatcttaagggcgtaaagggaaggtttgattcttttttggtctaagcaaattcgatgcttaattttctcaaataacaattgcatactttgatcttattttaggtttctacgtttcttcttctctctattaaaattattaatcaattgagatatacataaattttcctaacggtagtttttgttaccctcgctaatatttggtcttttaataataaacagtttatcttgctttctcaccattaaacattaatttgatatgatatataccgtgggtattttctaatttgattcatatccttttattcacaaccagtcgctgttctccctattcttacctcctctatcaatattaatatacccactttttaattttttaagatttctttctgaccttttcttcttttcactctctttcttttcttctactatcctcgctgcttgcgccgtttttcactatggtactttctaggctacctgcttgtttactccctttggtagggaccaaagtgagtattcagggctggctcgtagcaactagccggcaagtttccaagagcattagctttcatcaacttcgtgacactcatggtaccattcttcaattactttccacagacaaaataatcctccaacagaaaagagaaccgctggtttcctctaccgacttttcacaacaaaaatctacttctgttatgcgtactttatcttccattccgcccgaaagcgttgttcaagttacgggtaaacttcagcgtcgaccagagcatgatcgtcgtcccggtaatgaatttgaacttcacgttgaagatgtgaaattactaaacgttgctaaaaatttacagttatttcccggtgatgaaaaaccgggaatgcggatacagttagcaaatcgacatattcagttacgagcccccaaatataattcatatttacgacaacgatcaaggttggcttatcaagtacactctttttttaatgatagagaattttgtgaagttgaaacacctttattgtttaaatcaactcctgaaggggcgcgcgaatttgttgtcccttcaagattaaatcctggcaaattctacgccttaccacaaagtccgcaacaatataagcaaattctaatggcaagcggaatcgggaactattatcagatagctcgttgttttcgtgatgaagatcttcgtttcgataggcaacccgagtttactcagattgaccttgaaatgagtttcgttgataaacctcacgaaataatggaggtagttgaagatttgcttgtccgattggtaagttttgctaaaggaataactctagcaaaaccatttcaacatataacttatcagcatgctattgacaaatatggctccgataaaccagatattcgatttgaattacccttgaaaaatataacttctttgcttcctaaacaagatcccttaattagtactgaaatccttgtttacaatgatttatcacactctttgagtaatgcagaaagccgaaaattatgtgaagctgtaggtgaaaatgttgttgtcacatcaattcgggagcattctcaattacaaacttgggtaaaaaaactgccacaacttcgccaacttcctattgtagccgaggagcttaatcaaaaacttcaaattggtatcaacagtattgtttttatgacaaacagaccaaaatatttggtttctgggacaacacctttggggaaactgcgacttttgcttcatgaactgctggttaaaaagaaagctttaccagagctggacaaggatttattaaaattcgtttgggtcgtggattttcctcttttctcaccaaccgaagagaaaaatcaatctattacatctacacatcacccatttactgctcctcattgggatgatgtacatttactggaaaaaaagcctctttctgttcgtggacttcattatgatatagtcgtgaatggtattgaattagggggtggcagtattcgcatacacaatccagatattcaaagatttgtgcttaaagacgtgcttaaattaccagagaataggtatgctacatttgagcatttaatacgcgtattgtctagtggctgtccaccgcatggtggaattgcattgggttttgacaggctggctgcgctgttgacgaatgctccaggaattcgcgaggtcattgcttttccgaaaacctcttcgggtgctgatcttttaattggcagcccgtctgctattccagaagagatgttgaaagactacaacgttgctattacgcgacaaactcaaaaccgtaattagataacttaagcaaaaacattaatcatttaattttttttatacaaaattttaatctaatgctcataaatgggaacacgaccacgcaacctcgcggtcataaatcggctcattttaggtttttcatttccattctcatccaaaggtataactgcctgttcttcttcatccttaatatattcacctgtattatctatcattttttttctcagttcgtagtaacgttgtgatatagctcgttgatcactaatttcctcgactttcgcatcgaatgcttctttagactcgctaattttgtcagatggagttcgttcaactacaaaatcttttactacagatggttcatttaaatattccttggaagtttccgagcttttttctttaggcggtgctttaagctcggattctacagtagatttgtcttcttcttttggatttaactttgtattcgcagcccgattatttaatgtgttactcaaatcatcgttcttgattgtacatgtggcattagaatggttgccctcttcgttttcctttgcgcgcaatttgctccttgctttacgaaacgctgaaatacgactctgaaaatcgtctggtccaaaaagattatcgtattcttcagttggagcaggtataacttcaatattcgcctttccactccgactgacgtgtttaatttccagcgtgtctgaaaaatgtacctttcgaggattttttgacgaaagctcttcttgttcaacgatttgtggaaagtcactgacatttaggctctcgtcattaccattgacataagttgtagcaccagtcttttctgtaaaatattgaggatccggtggagctttcagttccttggaaaatcctatcgtcataccatgttcatcttcctcagactcagaattatcatctaattcgccttcctcctccatttcctgaatgagagcctccatatcttctaaagagtctaaaccgtcgtattgtactgcttccaaaacattttgtccttgcgcagtcgtcggaactggtagtaacatcggttcttcttcgacaattttattgtcggcattatctggttcttctatactactacttctagtttcgtttatagaatgaatagattcatttcctagtgaaagcttttcactagatgtagcatgatctttgttgccagatttttttgtttctagcttagcttgtttaaattttgaaagacgcttaggtcgttttttatgtttagacgtgctagtgttattatctttattagattccccagtatcttgggccttcgctgtcggatgctctaacacaatgtctcgtaaaacttcattttgggtatcttgatgtccattttcatttaaagtagagttattgagagcattcaatatcgtttctttatttttttcaatagcagaagcgtttgactttatatttgaagtagttctgttttgcattgcattattttttttgaaaagaaaaccctttttaaacaaagaagtcttgctaccatttttaatttgttgaaccatatctgaatcactcaatgaagcagcctgactattactaataggactctcatatgttttactgtctgaatgatcaccatgtttgctgggaaattctgagacaccaagtgttggagttgaagtaaattcagtattagaaggtaatgagcccatttctggagctttgtagttaatatttttcgtagaatcgttaatttcttcttcagatagctcttcaattctcgaagatgtatcacggttccccccattttcaatatttttgaaaccaggaagggatcgaaagacatccgcataatctattacagatgaaattctttgtggagcaacagaagcacttataatatttccatctttatcaacttcttcatgaatatccataacaggtaacccttctgagtttcttactatcaactcggatttcttcttttcaattgaagatgctaagtcattattgtaatttcccaaaagtaaatgaatatgatttaagactggattttcattagcaattagtcgtttgatgaagcaaacattatcactcaatttataagaaaaagtaacgtacaatccacatgggatgctgtttcacatccttcaacttttccatcttccttacagtaacggatcgccctaccgactgattcagaaatttcgctaatcttagagaagatttgctgttcaaaattgatggctactagtctttcgtcgttcattcgataagttgttttaaaggatcttaaatagagttattgaagaatttctaattcaaaataatctcacgccaacgatcgtttcgtggttattccggaaaaaggcatatacagcttattcgggcaagctaatattcactttaaaaacgagataataagtaattctaataaattttaaatacttttagtatttaaataacagggtaactaatataatatcgaaaaatcgatgttaatggaaatggctcaaactgagtaggaagccaccgacctgaccctaatgtacgtagaaagcgccatactgcaaatgtcctaagcatctagtaatttggtcccttactttaaattttaatattttctcactgaaaataatttaagtaaaagcaaatgcatgtcttaatcctataggtccaacagtttaagcaagtataaaacataatttgaacattaatgggggactattttgcctgggattttgcaaatatctctgggagtaatacttctggctccttaaatttaaatcagttgaactgtaagcgctagcaatgatggttgagttataaatcattctgaacatcccaagcgtaaaatagctaacggatttttctagtggacaacataaataatggtttgcataatcaggaggatggagctggaggaaggaatgaaaattctgaaagagttggaagcgggagtcctggaagtgtttccatgcaggttttgtctctcttcagtgctgtaaactcagctttggctactttggaaaaatcagaggaattcccttctgtagttaaggatgaacagtcaatttttcctgctgtagcaaaggcgtctaattcgttggacgagctggcccaaaacataattcctgctccttctcctcctgggtttaatagaaaaagaaaaacctttgatgaagacagttctgtagagatgatccgaagagccatatcagatcatttggatttactgaacaattgttgtattggcattgctaatttgaatgaggacagtgtgcacaaaatttcacttacacgttcagggaaacctagtcagctggtaacagtttcgtgtcgacattcctctgtcatacaaaagtcttatgggtcagagaaacgttacctatgtccaccccctatggtttatattaatgggaattactcttctatattcaatcagtcttttcgcactgagatatcaataatgaatgattttgggcaatgttcgcaacccatcagcgaagaatacactggccaaggatgtatgatttttcggtcactgcatatatcgagtttggtcgctgcgaaatctaaaaacttacggctttctctggacatgttctcgaatgtaaataaccaattgttatctcatttggttacttcttctattagtattgtctccaaaccttcgaaaaaaggaagcaaactaaaaattagtaatattacgttgcgatccggttcagtcgtcagcctttataaccggattaattcacaaactgtacgtacaaagtatacatcgattgaggctggtcagttttgtcttcgcggtgatagatgggtgccattgcgtattaacctgctattaccagatgaaaatggtaaactgaaggtatgcgacgatgtcgataacccagaacccattaaatatggctccatcgttgaattggtcgatgaagcaacaggaacgacgagtgaccctttaattattcgacgagtagaaaaagaccacattgctgaggaggacggttacgttaatcaaatgcatagaattgtattagaaagcgcatatcccatatcaaacgtacggcatcttaagatcgctgagcatagttcactggcatattccaataatatttcagtccgttggtttcttggggccacgtcggcacaaaacagaaatgcatctagtgaggctatattgcccatagaatgggaagctgttggaaacttgagttcaaatgaaatgactcgagttggagattctgtatgctggactatagtgggcatatcacattttgactgtacgatgatgttaccattcaatcaaaatcctgtaccaacggttactgattatccatatattgaagagccacccgaatatttggagagctcgcgctcattacaatttaaaattggaggctattcggtcggattacaaatttggctaggtgttcatggaccattgtcgtatagttttaccgcagctgctgatacgagtacaatgggtacggtcactctaggtctgtcgcaaatttcatatgatccttcttgtgcagaacaaaagtatcctttgttgttcgtgattccaggtgggattgtcattattggaaaatgcgagattttgctaacgtcaagtgcttttggaaactgatgcatcatgattaattttacgtgtggtttcatatggcgaaatattgaaatacaatttgttttcaaaatgatggaattaggttgaaatctctcttattaaatgaactttatattgtacaaacatcctagcttatggaaactctaacatatagaaagcagcggaagcttttgataagataattgaatcgtcgaaaatatgtacttaataattatgattttcaaaagctgcaaaacagaaaaacttttaataaactagtaaggtgtctgtcgagagctgtcgatcatatattatgtggaccgtaatcgtttctcctcgggaggagttgctgtatccacttccaaatttaaatatcttttatctgcttctcttaaaattttactatagcaaattccttcaacttttgaaatgctgttctccattactgataatttctgctgtaattctgacttgaccttagatggtaagtgttcaatttctgagcagtttttgtgtagtccacgaagaaatttaacttgctgagtgagttgttggacagagaacttagagccgttggttacaaggaatctcattatttcaccagtcatgtcacaaacaccgagtacatagtcgatgaaattaatagaaattctaaagctactatctttacaagaaagtaacgtacctgtttgtaaccagaatttgaaagtgacagcttcaacatactcttgaaggccgtgtgtacaagcagaagagaacttgtctgcatttaatccagccaactctctcttcagactttctagttctttgtgaatttttttttcaaaaatggatgttctgtcgaaatccttgggtagaggaaatccatcagaagaggatgtttgatgtaaaagaaagatcattcgtttactttgaattgtgatttcacgagaaagacgaataattttctccctcttatcttgatcctcctgtaaaaaatttttaaatgagaggaattcctcttccatatttggcaaattcggttaaagttttataatatcctcaattcagcaaagccgtgtggaaggtataaatgtataagtctatattatcaattgaattaaatgcaaatcaagatgactatttgttgtttaagagacgaaatattgtttagtggatcattgagtaaggttagttggctctgtgctatgaaattgaaatagtgatttgagctgcagcaggacaatcgaccatgtatggaatgaagagaaaatattgttaataaagatcggttaataggaataatgaatttttttggttatttaaatttactgtggactaaagccatttgcttctgacaataaaatcttgaacatgtgaaaataataaatatataaagaaagaaatttgagctttgcttgaacaattctgaaaataactacccaagttttttgtcatttccacgtgttatttagttatatttcttaaaaagagtcccgtcctttttatatttacaacatcattagtatttaaaataaatcttagcctacttaaaatccaaggcgcaaatgattgtttatcacagcataaattcttgcaattaacgaaagagtgtacattcatcaatcaatcattttactaaataacaatgccgatgaaaacagactcaatactgcttaattactcaaatacattaccaggattgcccagttaaagagtatgtagagaaagatattattcctactcagcgttggcacaaaattcattgtgttaaatgctttatttacaaagctgtaattgctgataaaaagtgtcacaaaccgggatcgaaccgatgaccaacagatcttcagtctgtcatgctcccaactacaccattgcgactagttgttatccatagtcattatagatctaaataaattgtattcttaataatggttttataatatatttttcaaatgcagtattgacaaatacatatccttgtcattcacagattatacatttgtaaatacttcctatgtacttaatcaaccttatttaatttacacaatgctttagaagtcgcatacaatctccatcgattatatattttataaaacgattttccttatgtattttaaacatgtttatcattacattactagagtaacacaaatattttttctattccaaaaaagcttctgcgggtataattttaagcatatggaatattgtgagttgacaaaaggagacgggataaattcaggtgtaaaaaaacatttattcgtaaatcacaagtcgaataatagtaaaacaaaaggatttatgttttggcggaatgggaattaagactatgttttttaatgaatgggatgtgtaaatatgcagtatctcaattcacaaactattatgaaaggagtgggagatttaaaaggaattctgccattgatccttagctgaagagaaggaaaacttaaacatattagtttaaatctaaccagcctgttagatattgcttcaattttcaaaacaaatgagtaatgtttattctcttattaacatagagaaaggagacaatgtatccggaaagaagttgtacgtaataataactttttccatcgaagcctcatttaactcgacatataacgtttcctcccaaattattcttaattgcatcgtcaatactcattataccatgtttagtttctacaattccaacttctgcaggctccaacccattcacaaagctaactttccttcctttggcaaattgcaacaactcagaaggagtcaagttcacctttctactaggctttgatactgcacgtatgtagtgaagaaccggttttccctcaaagtactttaaacccaaccatagacggcgggtcgctacattttgcctagtggtgattgtgggtaaagcatcgggtccatgaatatctccgcgttgaatcgagcttaaaaatccttgatgatacaaaacagcacataactcgagcacactgttacagttaggaacgcttgctaacgacttgcgagcgcgaaatgaattttgcaaatgcgaaaaaacataatgcaattgcatttcgacttttttaacacaatcctaatcttttataagcagtccaacaataaaagccttttttttctatacagaatggtgttttgaggaaagaaaagaggtatgaatgcagtttagctagtcacttccaaatacctctctctgtactggaagaatagtaagtagtgaacggtgtagctagtgttacacactattagcaagttaatggacattgcagtaatcactggatagtagtatattaacgacacgatactaaagttcacaataaatcactatataataaactaaaagcaccggtttactatgtttggaaaacaaggcgcaaaattgcaaaaccaacggttattacggcaaaagccgtctaccaaatgttagagatttactttgtacagaataaaatatggatctaaatcgctgtgtcaatctgttaatattatagcattcaaattaccatgaaacccacaaagttgtcagaagtgggaagcgaatttttgtgcgtttagtagttccaaaatcctcgaaaggtattcgcaaatgtaataatcgaaaaaattataataagcagtgttcaaaaaaacaagcggtacaacagcgaacgcctgtaaaatatagggatgtaaaaaagcatttgaatacaatgtaaattcacaattgtataggattataaaaattttttataaaataatggcataacgaattctttactgatattttaattacagaaaagaaaacgtgaattgaaaacaaaagcctaacagtatggagaacgatttataatgcttctttatgtggccgatcgtccagaaattactgatttactcagtataatatattgatttaattaagtttcgcttcttaaaaaggttgttagtttcggtaagctgtttaacgagtattacacaaagcacaaggcattttaatttcataaaaaaatgtccgttttaatttgaaagacgttcgaaatcaacacttttcaaaaatcagtgcaattaccgaaatcatttacttgaaagttgccagattaatattctcaaaagcaggttgtaaaaatgtattataactataaagaggatttcaagcaagcaaatataacaagaaaaagaaaacaagtagtaatcattgattttgaacctcccggtattgttaatatagaactagtaaacaaatagtaattcaatgtactataattttcgtcaatggttacaaataacaattgggttcacttttattgaatcacaaccacgatataaagaaagaagggttaaaactcaaaaatccgtcgatttggaacctttaaaaaaacataaacctatacaaaattatgcggtaatttaagaaaagctgttaaagataagcttatatttcttatgttcagaaattaaataagacttatgttgcgtttgcgtgctcagagaagtatagaaatagaccttagtatatagaaaattcgaatgtattaagcatgtaaataacaaagtgataaataaaatattttcttgatagttttttgatttaatatagtttataactcaagtaggttttatatacaagacaactatgatgagtcctaatctagggtttggtatatataagcttccaaccgccaaagcgaattgtcttcagccaactcgtcctttatgattcagagtgagtaggatgtcgtataaaccaagctcagaaatagctttacgtcccggttatggagggttgggcaagcagattactttgaaagctaacttttttcaaatcatttctttacctaacgagactatcaaccagtatcatgtaagttcctagaaatcgcacatttttatggaattagagcactgtaaaggaaatttacacatttaaagtaaaagcataacagaacacgtggcctttcttgtctgaaatataaatataaatacagaaataaatcgtgcaagtgttactggaattgtttaaaggtacttgttagcttcattcgttattcgactttactttactatacctggtttattttctcactttcttttaatgttctgttgtttactttgcctgctacatcattttgtatctgtcttgcattgcacgattcttttcttttgtatttcatctcttcctcaaattttgtacattaacgtagaattgcatcaaattaacgccttttgttgtaggtcatagtaggtgatggttcacgtgtcccacgaaagcaatcccagttgatttggaattctaaagaagttaaacagtattttggatcttcctggatgaattctgtttatgatgggcgaagcatgtgttggtctaaaggtgatattgctgatggcaccatcaaggtaaacataggcagtgagtcgcaccctcgagaaattgaattctctattcaaaaatcatctaaaattaatttgcatactcttagccagtttgtaaactcaaagtattcttcggatccgcaagttctaagcagtataatgtttctggatttgctgttaaagaagaaaccatctgagactttgtttggcttcatgcattctttttttacaggtgaaaacggagtttcacttggaggtggagtagaggcttggaaagggttttaccagtctatacgaccgaatcagggtttcatgtctgttaatgtagatatatcttcgagtgcattttggcgtaatgattctttacttcagatccttatggaatacacagattgctcgaacgttagagacttaacacgttttgacctaaaacgtctttcccgcaagtttcggtttctaaaggtgacctgtcagcatcgcaataatgtcggtactgacctggcgaatagagtttattccatcgagggattttcctcaaaaagtgccagtgatagcttttttgttcgccgtcttaatggtgaagagcaaaaaatctctgtagctgaatactttcttgaaaatcacaatgttcgtttgcaatatcctaacctaccttgcatattagtaaagaacggggcgatgcttcctattgaattctgttttgttgtaaaaggtcagagatatactgcaaaactgaatagtgatcaaactgccaacatgatccgttttgcggtccaacgacctttcgaacgtgtccagcaaatcgatgattttgtccatcagatggattgggatacagatccctacctaacccaatatggtatgaaaattcagaaaaagatgctcgaagttccagctcgtgttttagaaactccttctattcgttacggaggagattgcattgagcgtcccgttagtggacgttggaatttacgtggtaaacggttccttgatccgccgagggctcctattagatcttgggctgtaatgtgttttacttcaacgcgtagactccctatgaggggtattgaaaatttcctgcaaacatatgtacaaacactcacttcgttgggaattaattttgttatgaaaaaacctccagttttgtatgcagatattagagggagtgttgaagaactatgtataacgttatataaaaaagctgaacaggttggtaatgctcctcctgactatctcttttttattttggataaaaattcgcctgaaccatatggttccattaaacgtgtttgcaatactatgttaggggttccttctcaatgtgctattagcaaacatattttacaaagcaagccccaatactgtgcaaacttaggcatgaagattaatgtcaaggttggaggaattaattgctcgttgatacccaaatccaaccctttgggaaatgttcctactcttattcttggtggagatgtttatcaccctggggttggtgcaacaggtgtttcgattgcttcaattgtggcatcggtagacctaaatggctgcaagtatacggctgtttcacgttcccaacctcgtcatcaagaagtgattgaaggaatgaaggatatcgtggtatatctattgcaagggtttagggcaatgactaaacaacaaccacaacgtattatctatttccgtgacggtacctcggaaggacaatttttatcagtaataaacgatgagctttctcagattaaagaagcgtgtcatagtctatcaccaaaatacaatccaaagattctagtatgcacaacgcagaagagacatcacgctcgtttcttcattaagaacaaatccgacggagatagaaatggaaatcccctccctggtacaattattgaaaagcatgttactcacccctatcagtacgatttttaccttatatcccacccatctctgcaaggcgtttcggtcccagttcactacacggttttgcacgacgaaattcagatgccaccggaccaattccaaacactgtgttataatctttgttatgtttatgcaagagcaacaagtgctgtttccttggttccacctgtttattatgcgcatttggttagtaacttagcccgttatcaagacgtgacagccgatgatacttttgttgagacatcagaagcatcaatggatcaagaagtaaagccgcttttagctctatcaagtaaattgaaaacaaagatgtggtatatgtaatgtttgatggattgcatgcaataagtaatgaaatagatatacgattgactactggattgcccacaacttttacttccttattaaatctgcttctgtttttattttgctttatattattgtaattttctttaatcatttaatgttagtttttttatgctctatccactgttgatagcttgaccatgttccaacgatcaacaaatgttgataacgataatactaatgacattcacttaacccaaagcccgaactttatgtaagtgtcacgccaatatagaaatacagataaactaaatgatacttaaggatctcagaagaagtgattaaaatcgataaattccatgcacaatggttgaacaaccaatttacctatttgtctaattcagattcatctagcttttttattaagaaaaaacatcattcaaagcaaaatcattcaaatttgaaaacagcctgtttgaagagaatcagaatttctaattttttagagtatttgggttaagttcaagaaccaaacattgcatactgtgttaagatttcgtttagaggagcaaaaacaagtcaataatgataattttacttaactgatttgctccaagattgaaaattaacaccattatagtgtgcattttttttattgttcagaaaaactttttaataatgttaaatctttaatgttgatgagcgacctatacggaatgctttattaagcaaatccactgcatttaacatcaatccgctccaatagtatatagtttcatgaattttgttaaaggaagcatccaacattcttgaaaatccagcaaaagggagatatcaacggtctcttccaattcgcttcattatagcatagttaatcaacgtacaaagtctgctgccttcatcatacatcatttccatgccatctctagcttcagacccatgatccatgtggctaacaatttcagaaatttcagcagaaaacagattgcaactagttaggtaagcagaagaaatcttcaaaagtacaacacttacgttttaatccacttgatgcgaacacctccagcatgcgagctatctgaccaaaagggcagttcggtgctatttaggtcgctgactacctgagcatatcctaaagcattgtacgtttgctgagccacaaaaataaaataaacactggctttctgttaaagtgttagtataaaactatatcgtttaagggaaataaaagacaaaccttatatgcatcagaaattcttttggaagaatctttcttgactgcccaaatagaagtttttttagcatgagcaatggcagtctcgttgtcacatagcataataaaataacgggagcctaagttgttagaattatttgttttggtttaatgggctaagccttacggtgtgaaattccattttcgtcaagaacaactcggggattaatcatcgaaatgcgttcccccttctcatttctatgttcgcttgctctggaaaaatttaatggaggaggcgtagatgcacgagctttgggtttttcttttcttgaggcactatcattgctggaattagaaagcaggtaagaagatttctcaggataagctccaactggcgcgaccgaagagggaagggagtgagcataaggttcaagcaaactaggggagtgagatgcacgagtattagcaggtacaaaaggataccttgttgaaccactgcttgcaataccatgacgagtgtcttcatgagaaagttggggggaagatcgaacaggataggaagagtaaccagcttggtatgctgaagcggatgaaggaacttcagaagctaaagtgtaaggaggccttctgtatacttcttcttcaacataacgagaacttccaacaaccactgggtccgcaagccgtctagggggaggactaagtgtgcgtcgcttgggaggaggttgtatgccatgcaaacgagaacggctatcatagtaagcagaggattccgaacctgcatgataataatgtggagcatcagttgaataagaagagtaaggaggctgactttctggataagatcccgaagtgtgataaagcatagactcacgacgaagggatcgaaaataaggccattcgtaggagtgaccatagtcagtgcaatgcctgctaaaatcatatttaccatgtttaattaagcggggatcatctaccatcaatcttctaccgataggagcgtcatgtgactctggtgcaggtcttttcagaggtgaagaaaagttgtttgaacctgaagtagatagaacacttgacgcaacaggctctccggtatgagtagtccatacgcttctagtatcgcccgattcgttcaatgacggtggagctatataaggtggttagtaaaattctcgacaaaattaaacagtaggaggttttaggcgaaaagtcagtcaattttcaatgacactattttacattcctctctgatattttaaacaataatctacttacgccacaggcttcgcagagcttccaaatttggaagttccggaatggactttgatgacctagaagtagagaagtttgtgtttgacattcaaatttcttttatgtgtgataaaaagtataatcttttttttttgaaatcctctttaaaatgctaaaaatttgtaaattgagtaacggaaaatgagttgaagccagaagattgtgataaatattaaattaagttaataaatattcaccaaaatcccttgctttatattttttttacaaaaaaaaataaagagagaaccaaaaaaaccccccaaaaaacaaaattgctggtcaatacactaactgaatttatatcaaccactatcgtttactttaaaagtcttgccgagtagagaaataaaaaagcaagaactagcaagatagatatactcttgaaagaatagcggtaagtcaagtgaagaccaagccccaaaaaaaagaaaaaaaaatatgtttagcccaaaaatcaccaattatagcttttcactttcttcaaaagttagctatttcccgtcaactttcaaaataatgtttgaatgtttaataaaacactttattatagggtttactagtagcctccttagtgttggatttctggaagaaggcaaggtgcagataatcgtgagagagtaatttgattacgggtaataacgaatacgaagtactttgataaaacaaatgaatatgaaaaccatcaattactgagtaaataaaaaaatttctattttaaaagagttttactttttaataagtattccttgtaaattcacatttcttacaaatttgttcggcagattcaaaaaatgccccgtggcacagagagatactcaaaagaaagattcttttttaagattaaaaaaacaaaaaattgctctgagtgtaaatagtgaatggtcaaatgtcgactagtcgtttccatatttaccatcaacattataaagtaaatatttgatttgtaaattaaaatacagtcgactaaagtgtggataaaatggctaatacacaataccaatgctttgacagacagaaaagtaagagatcaaacctactgttaccagggaagaagcgatgtagcgacaaagtcgaaatgctgtttgtggttcttaagcaatacgaaattgtataatattattactaatataaagtaatcataaagggattccaacataagacaactaaaaatatatgaggaggtagaaacactttactagtttaagtggttcaagaagcgttcatcattgttcagattacgagcaaaagaattatggagaaggagctaaatacttgagatcttcaaatatcttatgagtatagcgataaagctcctcaacaaaggcatcatcatgagcgcgatgaagaataccacgctgagcaattgcagtgaagtaagcgccgttcaagtgctctttggaaatctcgggactggttgcagcatataaggaagtcatggcgcctctgattggatccaaaagtaaatactggaagactgatttctctaacaatttgagagcaaaggtaggtgagtaacgagtcagctcggtacggataacacctgggtgtagactaacggaatatattccatatttttctaaacgtttggctaaagcaatggaataaaggatctgggcatacttagattgtccataacgagcaaaagtacccaaaagtacatgcgggagatttaggtcagggaagtagataccagaataaggggcctgcaaatatgcaatgcttgcgacgtgaactattctaacatcgccaggtcgacattcttctgcagtacgacggagtgtggggagcaagagctcagtgaacaagtaatgtgaaaggtagttggtttgaatctgaagttcataaccatctttagtcaattcaaagggagggttcatgataccagcattattgaccaatatgtgtaatttctcttctttggcaatgaaagactcagctgcttggtacacgctttcgaagtctaacaaatccaaacgaagaaaacggatcttggaatgtctaacttcatcgtggatctgtttcataactttttgatacttttcctcgttcctaccagccagatagacctttgcgccttttctagccaactcgagggcagttacataaccaatgccacctgaagatcctgtgacaagagcgactttacccgtaagatcgggaatatcgttaaaggtccatttgggtgtattgagaccggtgtactctttgagagtatttacaattgcgctctcattcacgcggttgagcaatccctgaaaactgtaggacatcgtaaagaaatttttgaagctaatatcaattaaaaaaaaagaactttataaacaatgagcggggaggattttattgcaaagaagtggccagagaacaaacttattaccaatgtctttaactcgaaactgtagcgattatgaaatcaatcgatcaagtttggaacagattcaagaataaatcaacaattttcttttaataagcgttcttaagttctagaaaacacttaaatatcgttctcgtcgaatatgttgaatatgggtaagggtggctgcagatgataagttgcaaagagtgacgatagcggaagaggaagcaattcgtaatttatacaatgaccgctgacaaatttcttcaaaatccaagaaactcaaggcgtaacacggcttctttgcggaccgaaaatttgatcaagcatggtattacatcgactagctacttttgactacttggcttacaaaacgaaatatggattgtttagaattgaatgtatgaattgggtgctcgacagaatattggaatccttttaaaaatgtataacttgaacttattgtaattgaagaactcgaattcagattgggcaaatgaaagataaaattagacttaggtatgaatagaaacgaaaacttaaaaatctgcaatctataggattcccttctttaaacgagttaaacgtcatgttttattcagtaagagtcttagaaattcattttttcacttatactagatcacaagcatcttacagagccacccaatagcacattaatcggtttcaaaaagcaacttgcataaggcttaatatatcggtgaacattccatttgggtgctcatcttctgttagcatcattttggtacggtttaagataaagttatttatttaaagaattaaattactctaaaaacttaaaattattgatggtttcctctttttctctgctttatttacattttgctctaatagtgtaatcttgcgctcgttcatattcaacaatacgatggtctaacgaattgtgctaactctacggtgctggctgtgtgagtgaaacattgtcgtccgtaaagttagtcgtctctatttacacatgtacaactccaatttcagagccatactcattactgtttagaatcccgtccgtttcattcgttttcatttttctatttgtctataaaattcattcttttacataactattcatgctctgctggttgtaaacatacgagtcgttaatttatatttgtttatgtaaatggagttggacgattttaatagccgcattctcagtcaaatttttgataaggtaagctttttacaaattaatggagatagaagcttgctgtccagaaaaatgtaactggaatgaaaagcaaacaaatggaaatatcgttgcaacggcattaagggcactgttgatcaattccattgtattttacgatttcaattagttttactcattgctttgtgtttccgtcactactcttttcatacctgttctccctagtattgatggatctcacttctgtagtgggttattttaagtttttaggtttctaactgatttatttagtcttggaaagttcgatttgaagcatatgagtctttgttgcatgcattgaaccgagcattggatgattcagacgtttgtttccagccttggattcatgacccagcattatggaaacaagggctgtgtgatagtaacgtaccaacacaagagcatgccgtaaaatctctgcgatgctttttagacaagtctaggcaaaaaggagttaattctgccaaatcgttcgttgttgctcctctactcgaaaaatgtttaccatctcctagacaatctatccgtgatgcttctcaccaggctttactcattttagctaaatccgatgcgctggactatgtattagaagggttattttcggcggctcgcgttaagcatcccaagcaggcagttgcttctataaaagaattaaatagtttattggagaattttggaatccctgcactttctcctattccattctataaactgattcctactttgttcgcccaatcagataagaatatcaggcaagaagcttcgaatctatccataaccttgtacgcttgggttggtaatgcattcaagactcatgtgtttcctcaactaaagcaaatacaggtctccgatcttgaggcctcttttcaaaatgttacatctcgcacgaccacgggaggacatatttcaaattccctcaacacccaagaggtggttcttccttctttttcatcgaatgccaaacccaaaccacatttgtcctcaaagtcatcttcgcagggaaacactctgcaacgctctacttctagtttcagtactcctaaccgaaaggtctcacaaccttctgatttttcagcatctccttcccgttccattgtatctcctgccaaaaacattgtcggaagtacgcccgttgatgttctttccaaactaaccccagaattccataccgcattatcttctcccaagtggaaagatcgaaaggaagcgttggaaagcatggtaccggtgtgttccaatcctgtttatcaagagggtgactatagtgagttacttcgagtgattgcaaagtctctaaaagatgcaaacgtggtggtagtgggtgtagcggctttattattgacgcatattgccaaggcgctaaggaagggctttcttccgtatactggtattgtattgccttctttatttgataggtttaaagagagaaaatcgagtttggtgcactctttgctggatgcggccaatgctatttttgagagctgtgggttgaatgatataatggatgagacgttagaatttttgaagcataaaaatccacaagtaaaaactgagacacttcgatggctgaatcgttgcctacaattgacggatgtttgtccgcctcgagcatcgcttgaaacgctatgtagcctatgtgtgacattgatcaacgatacgtttgagccagtccgaatggctaccacaaatgtattggcaacacttgtgcaaatttttagtcagccagtgttgtccaagtatattgtgggattggatcctaaaaagttaccaaaaatattagaactttccaaggacattacggtgaatgcgcatccgaatcaaccctcacgtcccaggctgccacgagtggcctctcctttaaagacatcaccggttaaactggctgttacaccacaagcaccttcaccattaccatcctcgaatccatcacaggcgagtttgacagaagaatctctatctacacgatcttcgcctacgaaaccatcgacgacgtctttgcgtagtcaatcgttggtgaatagatttgcaagttctacattgaaagcgccatcatcctcttcaaagggagtttcgaatgcggcgtcgtcaaaacaatcgtttccgtcatccccttcgatttcgaaaaagttagagactagtcgactttccacgaagaagttaccgggatcaacgatgaaagcagcgtcggcgctcaaagaatacccacagcaacagtctatgaaaagtggaggagaaaagcaggacaatttggttacgattacaatgtcggaaaaagtggagctggatttgttgagagaagaaaaagccattcgacaagttcaggaagcggaagatgcattggagcgagaacggttgtttcgagagatcaatgatttgcaaattcagaatgcagaaatgaaagaacaggtgtatgagaaagagtctacgatatcgcaaaaggaggtggagattacgagtttaaggaatgagaaggatcgattgagtacacgattgcagcaagtattgttagagttggagaagcagcatgagacgaatgaagaagcgatggatattgatttaaaagttcccgagagtggagcgatagggagggtgacgacaagggcgacagcaacgacagcaatggacgaaagtggtaacgctgggatggtatcgagtggtattcattctgtgtcgacaaagccaagttcgtatgggacacggcgttcgctggcaggatcaatgttacaaaagccgacgcaattttcgaggccgtcgtttatgttttcaccagaggcacgagacaactggagggagagtcatgatttgtcaagtcatttgtgggagcaaatccaaaggatgaagaaggcgtagtgcccggcgatgcatccgaaagtatgactgattagggcatgctggatttagcaaagacgaagaaaggcaaatcgagcgtcgtttttacgtgttgtaagagaggtcgtcagtttggtgaatgcacaagcgtggaaatgctggtagagttttttgttggagtgtttgttaaagtcgattaggtagagttgaaatcactcaatttgtatttctaattaaagtcgatcattttgtaatgctaattgaaacggtcaagaaagaaatcagagttttggatagatgaataggaaaatgtagaaaaagaagaaaagaaaagaaaaagaagaattcacgagaagagaagaaaagaaaaaagacaaatcacaagaagaaaaagaattcacgggaaaaagacaactgcaactttttttctgcgctccatttgccaattcaacaaagcgcgtcccctgtgcgcattgccaaacaaataccactagctttaggcttgatcctaggattagcgaacaacgggggtacagtgtagtttggcgtagtatggaataagtaggaacgagtttgtaggtttccacgttaaatgcaaagtacgaaagagcttttccactgatagataaacgatgcataaggttatacagcacgttataaggtattgcactatgcattttaaagcagcgcagcaattcgttccttgcaagatgggcaaataaaaactacgaggtgataacaaaacggtgtattactttgcgaaagcgaacgtactgtattacattgttagttagtgtattacgttgtaaaataatgcattacattgtaaaatagtgcattacattgcacctactgaaatgccttgcattctgctacatttacgtggtagcttactgtactacattgcactctactgcactgcttggcaccctcttaactgtctgtcctgctgcgcactgcctttgcgcacctttcccatacctcggctatatgagacactaactttatccaatagacgatcgcttcttgcggcgtttggttatcgtgcgcgcgcaccgtagggaaaggagggaagcaaggcagcggcggcagagcaggagtctagtacagtaaggcagcgaggagggaaaagaagatttcccatatgtcgggaagagagatttgagagagggagagaagtacggacggtcggaggagcaggagagagaagaagagccatgaaaaaggaagtgaaagtagaagggaactagtaggaaaatagtagggaaataatagaggtattcttttgtttatttcgtttaattttattttatttcgttttattttatttcgagtattcttttgtttatttattttctttcgttttattttatttccttttgtcgctcttttttctctcttctcgtcgctactctagcatttctagctattatcagtacatcgccatgccatgtgccatgcaatgttatgctatgctatgccatgccatgcccgttacactcccgtgttccatttggtgctccattcccgtattgccaaagatagatatttccgtattcactcgatcctcttcatcttccgaataaactgataaaattgttgcaagtatctaatactcattcatagtcagcgtcggcattttcttaaactcgtttacaatcatttcttctgaattcatctaatttcttctgaactcatttcatctttcttttcttcattcttactacactcatatcccgtttcactcacaactcacttcttcacaatatcactcactctctttcgctacttcttttctctctctcacttttccatttcttgtcacctcgttccttgttacctacccttgttgcctctaacttttaccttttctctattctattctcttttgttttaacctttttttttatttttgtttcatccatatttatccatttatattatctttctttctatatttatctttatcggtccatttatcttttgttttttctcttgtctctctctctctctctcttacctttctttctcttctctactctactctactctactttacactacactattctatcctaagctactccatcctcctctacactatcctatcctatcccattctcctctgtcctatcctcctccgttttatcccctctatctctattcatttctctactctatttcctttttacccactttgccttcctctgctctatccttcttcaacacacccatcgtcacttctccctcttctctctttaccacatcctaccactccccggcctattcattcttttcactctctttctttctttcacaacgacgacgcgtttgtttaccccatcggcccttcaacactcgctgcccccctcccctcccccttcagctccagttaacgcggtgcgccaaacgcattggtcaacatcgctatccagaaagaaattcggttttatattatcgcgaatgggaacgtcatgtttacgtgatagaaggaatggacatatctatggcaactgtggccagcaagctgaccaaatgatgtttacctactcttgttcactacggcaagtgatgatatcattttcccaccttagctttgtatatatagactggctcgctcatttaccgatacacctttatccatactcacgttttcattgactttagtcaaaactttcttttcttttttatcctttaactatactatactttattatagtatcctttctcataccataggatataacataccttgggatatatatatatatataatcttttttttttttatatataccccatcacatttttgttatacccagagaatagccgctaagcaaaagttaagctaagctaagtgaatttgaaagaaatccaaaaggaaaatttcctcgtttttccctttccccaaaaaaaaatcccgactcctttccattttttcatatagtcgacaaatttttttatttttgggctttttttatacacactctctctatctaactatctatcctatttaactatatacccacgaaatttcgtatcgccctttggtaaagtgttaaacatttttcgtcctactcttttttttttacttataactcgtcctctctctactaaattattctcactataattgttcttattagtatcatcacatactaatatactactactactaccacttatttttattattactaccatctcttcttatttacccacatctatttctatttctgcaagatgatgaaccgtgcgtactctttaagaaacagccgtgcccctacggcctcacaattgttaaacccccctcctccctcctcttccactcgtagtggtcgtttgtttgcccccttgagtcataccatgcgtatcaaccacgctgccaccttcacccctgacttggctaagcgtttggctgtcttggtcaagatggaaaagaacgtgatgcgcagtatggaggtcaccatccgtggccgtcgtgattgtgctcgccaactttcctactggggtgaggactgcgatgacgatatcagcgacgtcaccgacaaattgggtgtcttgttttacgagatggccgagttggagaactacttgatcgatcgttatgaccaataccgtatgacgttgaagtccatccgtaacatcgagtcctctgtccaaccctctcgtgagaagaagcaaaagctcttggatcaaatctatgctcttaagcataaggatcctgaatcccctcgcttggtcaccatggagcaagagcttgttcgtgaggaggctgcctgtttggttgccgaggctcaactttccaacaccacccgtgaaaagttcaagcaagccatgaccttcaacttggatgccctccacgagcatgccgagaagctcaacctcattgccacctatggcagacatttgttgaacttgattgacgacacccccgtcactcccggtgaggctcgtcctgcctacgatggttatgagacttcccgccaaatcgtcatggatgctgagcacgccttgagctcttgggttcccagccaacccgccgtcaactttgtcaagcctcaaatcgaggatgatgcccaaagtgacgctcgttcctggaacgagtatgaggctcaaggtgagcccgtccccgttgagcaagtcacccacttacaagacgacgttcaatccgacactagcgagatcattgagaacgagcctggcatgcaccctcatgtccatgctgagcgtatgtctcgcattgcttctgagtctagcgatgccgttcctcagcaaaccgccgtccaggttgcttaaaaaaactctttactttttttctatttgtcgtcgtggagagggaaattgcagtgtcaagcgaaaataaaaaagaaatttcttgaaagcttatcgtaatcccatttgggctttttcgtgactttttcctttttggatggattgatgatcccagaaacaatcgttactgacaaacgataatgggtttatgatattcttccttcgtttgtcgactcttttttactactcttttccccaggtccttgtttggtcataatttattttctttattaaagaataattgtatgtgtcatctggttcctttctctcttttcttttgtcatagaaggaagaaggaaggtggtgtatgattgaattgcttcgacgaaattggcgtttaaaaaaaaagacaggctaaaggcattgcaaattccacacctctcgttttttataaagagttatgaaaaaatgatgcggacggataaaagtttgttgaaggtgtggtggtatctatctatctatctatctatattccctttgtggacggaatagagaaagatttgtttgattgaatgaaaggggttaaaaaaacgtcaaaagttttcaatatttgttggttgtgtttttgttatccatggaaaaaaaattttttaaactgtctttttttctcccctttttccttttattttattttattacaatcgtggatatatgttgctttgagaattcaatcgaccgagagtttgattggtttatttttttcgtcagtgacaggtatgagctgaaagaaaacttaatttaataagctggcgtgcgcgaaggagagcatgttagacggaaaccctagtttgctcatagctaagaaactgttcaatttttacatagttattataaggcggagatgtcgcaattattttattattataccttttattataattattattttatttgtttttatatgttgctgctattgctatcggaggaagaaaaagactctagactggcttggcttggctggctggtggtgtgagagggggaatttgaagaaagtgtgttttgcttttagtgggtttagcgtagctattattttgttggtagtatgatggatatttgtgccagcttggctagtcttttgcacgtgaaggatgatgtacttcgttgcaaagagcctttttttttctttttgaggtaggtagatttgattaatcttgagaataagaaaccataatatgattgagaaaagatggaaggcgagatgggtaaattgcaagggtagaatagtaaagtgtattatgagttggaagttagttagtatgttattattattaagaagtaattattagaattagcaatgcaagtagtaggaatcgatgtattaggaggagcagaattaggagtaataagcgaatactttagaagaggagtcaatgtcgaaaaaagagaaaacaaggtaaattattaacgcctttccaaaattattgttttacttttaatttagttataccagaattgaatcgaagcttatgctacacttgtgtaaaatgaatcccaatgtgaataaatcgtttttttcaatttagtgggcaaatgcaacaaggagctggagagtaaactcaacgtaaatgagtatgaatcacttgatgtatgtcatctgatgaagaaataagtagacaaagtcgggaaagtcagtcattagcaatgactgttatcttgaccatttttttatttgactcagccttccagcaatgatgaagcgatcgaagtggcaatgattgaaagatttatagagtagcgataaacttttgtgatgagaaaaattattgcgaaaatgagaattccgatccgactttaggtcgaaagatttggaatgaaattgttagactaactaactagttgactgacctttgttaatacaaacaagatgatttaaatgctatgccatgttatgcgatgcaatgaaatacactatacaatataataccatacaatacaatgcgattttgatgggatgcgatgggatgcgatgggatgtgatatgatgatgattgtgactagattactttttagcatcatctaggcgacaccaactcgcatcgaatattgtgatgtgcgagggattttccttaaatattataaagtactggaaggaattccaatgaaatacgtaatagggaatggctgatctcatggaatcggtcgcgtcgcgtcgcgtcgtgttgcattcgcataacgtaacgtaaatcgtaaggagattcaggagtttttcttgcgaaatgcgcaaaattacgtaatggtaaaataatgatgaaataacgaggctggatttttatgaagaaaaatctaatctgattgtagcttagatgtcaacttgacatttcacactttttgagagttgcctgttggacactgagtgcgactgagtaacgttgacatagacattttttatgtaaaagtatttcaccagtatgagaagtgagatctggactgagactgagctggaccgttgctgtgtcgctgggctgggtaaacagaagaaagagatatgacaaggaggtgaaactttggattcacttggtatgctatgaatgatgaaaagatgaatgaagctttagttaataaaaataaagatgcaaaagaacaaaagaaatgaaggtaatttggttggcttttacaatagtacccccagaatatggagaaaaaagtggaaaagcaagcaaaaattgaaaaaaatttgacttttagaatatttggcactttaagaacctgctcagctttaaaacatgaataattagttaaaatgctaaataattcttctttctatttaatcatctggatatttatgtgcgttcttgtttatacatttctcgagctgtaccgctatgcaacgtgcgcctttaatgggttataccatggcactttaaactagtttggtatccaagtgctgtctcgcacgcagagatacgcaaaatgctgtttagaccgcaacgcataactgtgtattacacgcaaagctatcacactgcggtacgttatattaaacgtagtaccatgcaatgtgttatcacgttgtacggtatttccatcattttgctgctgaaatctgttaactcaaattggcaattcgtttaattgctttaaaaataatacggcgtttgagaaatagtacgctatcgtttagtcgggtagtcaaatcgtcaacaagagtgaaatttggaagaataacatgattttgtccctcttcagacatggtctttctgtaaataagttgatacacatggcatgagaagaaatgaatatcttaaattcggatacctttttttacgaaggattttcccactaacttttgaaatattttagatttggtatagaattgcccatcgtctaactagctttccatgctcatacaatagttttttgaaaggtgaggtgaaaactgtacaaaacaaattttggaacagaagagttcaatgaaaaactcattttcgcttatactctttcttgttgaaatcttttcctcctattattgatttttgttcgattctcatggacttggtaatgttgcactcctatccacaaccgatcatatgagtattgagtctgttttgcatacaccaacacctttcgccaaataattcccatttcgtttttagtctctgctcaaaacaaaaagacaacattctaaaagaatcccattgcattcatctccccattcatcttcatctatgatagaggaccatgtattcattcaatgtcttgtgcgataaaattaaagcttttcattaaatcctccttcatttagcatcatcagctctaatcgttcctttctcttttttcctattgcccgttcatccatcctagtatttttggcttgtttacactgacacatgtgacgcgacagccaaacgaataccgcgacacgttatttttccttatagtaccctttttctcacgacaagctcttctcgtaatcgaaacaataccaccatcactctgcctcggttttttatttttgcgtgcaaatcttcatcatcgatagactctcgatattctggattaaagagaggggtctccccctctccacctcgtatacagaaaccgcaatacgggacccaatgttgggtctcacaattttacaaagctgacgtcggatggcagaggaacccacgacttacctttagccaaacaccctggtacgctagtgaaaagaccgtattttggagaggtaaaagggccaaagagatccttggaaatgaaattaaaggtcagtattggctgcgatgcacagcacacacagattgcttgggtgaattatgaagggcggcctactgaagtcgatggcccgttatgggttggtagaatcctcgttcgcgtacgcgatttcgatggttttactcctgacggtagccctccaaagagagattccgagtattttcgaggtcgctcacgaaagtttcaaatacaagctgaaggccgattcaaaaaggaatacaatggagatcaagtcatttatggcacacagttcgaccatatgatctctaccttcccagaaagtaagttttttaaaagcatattctttagttttcttcttcgttttatctcatttcgtctttttttttccgcggtgcttaatgctaattccttttcactaggtgctttccgagctggtatgcggattgccaaatatattgaccctgctgtgtattatgataaatatgccagatccccgtatatcatgtcaccgtaagtattgatgctcgtctgttggatatgcataatagaaagggtcgaaaatttttacaatctgggcattgcctgaaaacaaaggtttattgaaaacaaaagaccgaatttaggcatcttgattattcgctttctttctttcttttttttatttttcttataattttttaatcaccccatcggtttgcttccactacctcttgagttcctgattcaaatcatatagtctttttgttttctggccttatcgattgcaaggttttccattatcctctcagattatctttttttttaaaacacgatttttaaccttttgacttagattcgtcgcttgtgtgaatacactctctgcatggccggctccatcgcgtcttgaagatgctgttatttcattagtggaagctgattctcaggaatcagacactgaatcgttacctgaaattaacgactcctcggatgtcagtttatcagaccttccctctaccaacgttactcccaagaaaaccacgacacaaatagatgttcaaacaaatattgttactccgccaattactgttacagcagtacccgactctccaaatccccctgctgctacccccgctaccgttgcagataatgatgatcttagtatagtatcctctgattctggaaataccactgcacctcgaaaaaatagacaccggtattggagttttgctggatttagcgatagcacacggttttcacatttaaacgttccggctgcaataccggatgctccatcagttaagactgaaacttcccaaaacgtgtctcaattatctgtaaaatctgcagctacttctctagctcctgtggaggatgatgaagacgatgagcttttattacatcgtcacattaccaataaacataaggattttaatttacatgtcaagcagctaggattgcttcacaaacctagtttggacctggaagagggttatataatggatgagaattatggaaaggacgtgtacaagcatggtatttccaatgttcctgatgacgaaaatgaagatgacttgcaacgttactttactgctttagaaatgcaacaggatcaaaaggaacagcataagaaatctaaaaacaaagacccgtttcgtaaaattacacatccttctttacatcttggaaaattttccacgcccaaactaataaaacgtatgtcccttcgctcaaaaaaaagtttaagaaacgattcgaaatcggatgacgtcggtaattctactcatcgattttctaccgctagtgcagcatccacgtctgctgtaaaaactgaaaaagaaaagaaaatgtcggcgccacgtcgctctcttgataaattaattcgcataggttctttacaccgtcaccatcatcatcatcacaaaaccgacctaattgaatctgactctggaattgaagccagtgaaagtaaccgtcgtaaatctgacattttttctttttctggaagaaactcattttccgtttctcgtccttcctcttctcattccacgttgtcatatgccaatgattcagcatcatctgctgttaacgtggctggagagactgggtcgttacctccgctacgtgaacaaacatctataaccagcggtgtcccaccttctaataggcttaaaaaacacgtttcaacacctgaaaagattgttgaggagcgatcgattgatgaagtatcacaatctaatactccttcttcaaaacaattgcctcaatctgttgacggaaagactgttaccgcgaatgctaatagtaccaccgtcgcaaagcaacccacgtctaatgtggcgttgacgaggccaaagcccgtgcggacggctactagtcaatcaaaaataccgaaacctgttaaacacatcccttctgattcaaataatctcgatccacaacttggaccttggagattcgccaatcccaaagtggatcctatagaagacaattcgtttatttttggtgaacacaagtcagtaaaggaaagacgaaagtacttttcaagctccaaattttgtcgagaaaatttcttttacgataaagatgtagtttattgcatgagtttcttttcccctcatatggattttaatacctttaatttgaatatcggacccattcggctcaatgtttataagcatttgaactctgatggtcatcagccaatccgatatatgatgcgtgaaaccgatgatgaagatgctgttatgtttgttgtcgagtttgacctcctcgaagatgatgatgagacagttcttgccgagcaggctaaggagcgtgaaagaagaaaacaaacttaacgattatttaggcctgttttttgttctttagactttaatggcggtttgtcttgtatcgtcgaatactgctcttttttgtgctctctataatgactttatgtttcggtacgcgacactctcttttaactgtataaatggaaattagagattatgttgccgtaaataaaatatgaaatgagttcgactagccatttaattattatcctggaaggttttctttacatggtaaatgatttcgcttatctttttttaatagcaggtgttcagtgtcaatatttacgttccatccttccgaagctatcatcgttccttttatatggcctagtcggctttctaatgcatttttgtttatatgcttctttcaatactttatctgtgtttgttcttatggacccattagacatcattttttttaatatgatttgctgtaagtcggctttttgtcttttttctcttacctatacatgtataacctttataaatgattgtagttaattaattcgaccttactctttctttcattttctttttttgaaagtaagtagtacaacttcatttaccatttgcaaatctacgtggtatataatacatatctactgacttgcgtgtaaaatgagcaaaattgtctttacatagctacgcagtcgctacagaacaatgttttttgacatacactatagatgcagactaaaaaattttagcagaaaacaaattcagataaacctaaagttatgtaagttactgtcaaaatttttaaaagttcagttaagattattccttttccctaatttatgttttgttaaaactctatgtttgatgcatttaaaacaagaagcctattgaacagcgaaatattaagttaattgaaacattaaaacatgaaagatgctgtttccaacggatcttaaaaacacgattatactaaagagatcagcagaaatagttgccacgagacaatagggaacattttccgacttaatatcacagcctttataattcacaatatttcagttaatgaactaccggtctttcggtgagtgtgctgctacgagacgatgtatcgtcataatcatactcccgctcctggttattcacactaggtgcagtagaaccaccaacattatttatactgggggccgtcactaacgaaaatgacgagacggcatcgtcactaaagcttggagggaccctgggtgagtcaacagacttcctgacgtttgaaagagatggtgcatcagtatcatgatgtacagcattgccgtcctgtggaagcaacgtggaaggcaaattttgagcttcagaaataactgtagtagtatgtgtcatatcaatgggagcatcgctatggacaaatcgactaggattttcagcattctctaagggcacatcattatgaacaaaacgatcttcaccatcttgaactttagtggggtcgtatgcaagggcagaatcatcaacatcagttaatttaggggcgttcaattgcagaggggaagcggcagcattagtaggttcgacaacttccggtgcaagattgacgggtttctcaagaggtgctggtgttacaggcgtgcgagcgggtgttaagtccgagttttcgtacatctttggttcaggcttagggagggcagtaatattagcgtcgttttctgaaggctgtgaagaagaagttcctcgttgttgttctaagtcggacgttttaggaagtgatttttgattcttggcgacatgaaggtagtgaccatacatatacatatgtaaaaatgcgatccatggtgtcaaaacgaaaccttcaccaccaccaaaaatcagcttgaacacttgaggtgccggataattattaaaataataatcattgccttcatgtctaccaggagcgcaaaggataccgacggtggctggccaaaacaggaaccataagggaactgaccatactaagccgcgtaatccgacaaagacgagccactccatccagcgaaaaacaataaacttaaagtggtatctaggcttggcacgaagcacttccctaagcaaaaagttttccggccaccacccaaagtaaataggctttacaagtccggaacgtaaatcaccctgtaccaaaattgactcaacccagtacgtgacaatagcttgaacgaaattggttacagcggcatcaccagagagtgtatcgggaagacgccaaagacggacggaagtctcggtcttcttatacataccatatgcaatggcaaactcaatacctcccgtgataataaaggaaccacatgcaacaatgattaaataaactatacgaggaacatgaatgttatgtctgtaaaagaaagaatcttcattgatggataatccctcatcaaaaggctgacgaccacgattaatgtgaagcaaatcaatgtccgaagtattcttaacagtaggcttctttttgttggaaaagtatttcttccagtagtcggaagtaaagacggcaggcgccattcggaggaaattagtgacgaattacttacttccggtgaatattaagtaaacagcaggcaacgagatcgtaaagaacagatatgttttaaacgacaagaataagttgaagatcgaatgaacacaacttgggaagataaaaaatcacgtaaatagaagttaattttgcggaatatcttcaattaacagacacagatggtccggttttgtttgagatagatgcagatgaaattaaataaaaagtaaattttcagtaatagcaaaaaaattttgaggatatttttgcctttggtaaaaaaaagaatgatatacagtgagaaatgaaaatttttcaagttttcatacacgtatgtacgttcttccaatattaagaaagcgaaacagaaaatgtcgttttaaaatggattaaatcgaacagattactaagaaactgatgtgggcttatttttccaatagaaaaagcaagacaaaacgaccgggttttcctctgtttgaaaaaaatttcttctcgatcaaactatacggagaaaacgaaagaagccgagtacgagatgattaagacagctgcagagttagatgataaaaagattgcaacaaatcgcacacagtaataacagggcttgaaggtagaagaaattggttatagcaacccgaaaaaaaaagcggaataacgatcacacggcacacaatagaacgaaattataggggagcaaagcagagtagggcaaagcaaatcacgtaaatacgtcgacaaatattattataaagtgtaaaaaagatttaacaatattgagaagacagatgtgcaggcatataaacgagaaaggcgaaagaaaaaagaattagttcgtaaaatcaatcaatagaaagactttttttcgaacaagtattatattgctcacaaaatcaaacgttcaaacaagaacaagggaaattaacagaaaacgaaaacaaacagataataaattaattaaaaaatagtaagtgtgaaggggtagagtaggtttttgtacacagacgttcccaaaccaccgttctccaataaaaatccaaggataaaaaaattgcaaatgaagccggaacggattctacaaacagatgaagaagagaaaacaacttcaacagtgtaaacgataggaaataaaccttatggaagaacttggtacgccaaagcaaactatatgaagcctcagtccgcttcttttacactcaggtataatccgtaaacaagtcgcaaaacgctccgaaaaaaaacttcagaggaagcaaacttcaacagaattaaagaaccacccaaatcacctgaaagctttcagtttccacgtctaaacgacaaattttcgaaatttaaaacgacaagtcccttgttgtgtgtttgggggacggatgaagcgtaagcacatgctacgttatgttttcttcatgatcccatactcaaactcggcaatgactgtcctgtgatgtcataaataacgattttgttcgtagtatataataccctaccgtaatgtaccgctctcatctcccggagtgcgttatttcctgacctcgtgccccagacaaccatcgctcggaagcgtcaggggtcttgaacgagtccacgtaaccgagccggggcatcctccatgtgggtaacgtgtcacctgctcaagagagagaaagacgagatgaagaaaaaatggagagaatgggcaaaggaggtatgccaatttggaaagcgaattttgtgcatttcaattactgatgcggcactcgtaaacctagaggtccttgagccaaaaaattttgagcctgggacgctagacggagcgggtttgttcgggtgttggtcagctaacgggttgggaattgcattggcatatgaaattaccaatagtagatttgagatcaactcgggatatacagttaaagtgaagtgtttaaagagatttcaaggtgaggcgagaggctagaatgctcatgcagagcatgcacccacgatcgtaccatagaagggtgacagatggaggataaaccaaggaaaaaaaaagtttaatagaagaaacaacgtttaatgtttttaaattgcatgagacaaagcaatgttctcaaatcaacaaggcatcttctaagccaggctgcaaatgtgtaatggaccaatggaaaaattcttactcacatgagtaaacgtataaaactaaccctccgtgtgaatggtaaaccatgttacacagataaagcagccaagataacagagaaggaattgtactgtgtgtgtgagaaaatattcacatgataggtggtgcttaggaaccaagcaactggcggatgcacagaagaaaatggtagagaaaaatgtcagaaaaacaaagacaaatgaaaaaaagaaaataataataaacacttgaatgaatttacggatgtacgttccagtgaatgaatgagtttacggaaaagaattgggttggtttcgcctcccttttccctccctctttttctccacagtgaaaagataagattttaaaaaaatttaacattcagtttaaggaagcaaacacttttgatagatggtttgaaggccgcacatagtttgaagacaaagagacgaagttcagttgagtttgagatttcataaaatggattgtttcaaaaaataaaaacaaatttttttttctgttctgtgtcctaatagacattagcaatactataaacaaagccaccacatattataacatggatgaagaattcacaaatcagcatggaaaaaaattcacggatcagttgcataaataaagcttgcataactcatcgacaaaacattggataaatagactaagatagatacacaagataataatacataaataaattacagtgaaccaaattttagagagggggtaaaacgtcaaaaggttttgttacaccaattgacaaatgaaaatgaaacgagatccatggatcactaatagaggaacattttgtttctccattaatcctcctttaatgatgcatcgtcatccacaatatcccaatgactaccatctaatcgaggaaaaaagcggccgactttatcttgatacactcgatataacggatatttttcacaggacatcttttcggtaagtctggtcgagccttgaaaaacgcccactagtccaagccatgcaaaaatcgtccaattcaatagtgattctgaagcgatcgctccaaatagataaaatgaaagccaaataagttgttctgctaaaaagttgggatggcgactccatcggaagagccctgtagcattgaaaccacgtccaagcgacaacaagtcatacttaaaccgaggtggcacggttttgtcgacattgtaatgatttcgcgcttcatagtaatcccattgctgttggtcggctagcatttctagcacaaacataaacatgaaaagctcgagtgctatccaatcccatgctccaaatgctcgttcgtttccagccaacatggcaatatacgtgggagatgcaagcaaatataggtggagcacttgaaagatatgaatgtaaaaatagtggaataatggatatatccatttaggcatgatttggcgaactctcacccaacgatagtcctctgctcctcgattataacctcctttacggtaataattgtaagtaagacgcgcggaccatagagtctgcaaaaatgccataatcattaatcttcgcgaagcaatgttgtatcccaaaccataaaacagaaaatgcaaggaaaaagccgttggcagaattggccatagccgatccacttgcgatgtatttttcgtccaaacagacactccccaaagcacatttcccaaaataaatgagagaagtagtcctacaacaaatggattcgtattataataaaaatctgcaaaattcaactttccagtaaacagtaacttcaaattgctcagttgatacaggtaaggagatactgcaactttccattttgcggcatcagatgccgaataaataattggcatggtggatgccaaagtcatagtgctcgtttgaaaaagaacaatgggaatgtcagaaagttggctttctatagctccacgaaatcctctgtctcattgtgacgttagcttctggaataagaaggattagtgaaatccaaggagcctgcgttttccaaaaaataaaataaaataaatttcaaaacaaaagagagagaaaacctcaaggccattaagacatgagttgataaaaagagagggtgtagaatgtatgtccttatgttaaaaagtgactttttagaaggaaaaaccaaattaccatctgtcaacattattttgcgaaacagggagtcaataaatttaaagccaaaattaagagacaaatgccaagcaatataaacttttctttcattaacatttgcgaatcaatgcctcgtgatttacatgaaatgatctagaaattaaagcaaacttcaaaattgtaaattaaaccaaaagatgcatccttctgtttattttaataaattagccattttttcgggagataactgttcatgacaaaatcgagcataaccgtcgtattgtatcccgggtaggcacctctgtttttgatgctccaacattacatctttggcagtttgcttcatgtttagtttttgtaaaatattactttcttgcaactcaaaatcttcggtaaaaattacctgccagcttgtgtgctttgcacatcttcgcttctctgtaaagcaggtggactcaggagaaggatctatactcatgtcaagagatagcggtgctccatttgaaactttttcccacaattcattcatttgttgttgattgaataaaagtcgagaatcgaatccacacagatctttcttaataccttctctttctttgtaagcaagaaccgctctccgcgaagaatctttgatcaactgaagaaatatttttttgttagatgctacttctttctctttatttaattgcacaatttctgcgttcagcctattggcctcctcaatttcaaaattgtacacaacttcaggaggaacttggcttggcaatgtcggtcccaccgtacccaaattttgaaattcttcccttttttttgcaaacaatacaagattttttatagcagaaggttcaaccgtactcagctttactttttctcgaaaaaaatcgactccatgtttatcactacaatagttggaattaggtcttgtgggattcgagcattctcgtaaccggcattttcttttccaagtagttataccctttccttcttctgtgcatttaggacaaaagtactgtacagttaaatcattataagattcaggtatattaacgcaagtgccatgaaaccaatcttcgcaaccatcacatcctaacatccatgatccatcatcaggcttttggcatatacaatacaatggtctttgatgatcggctgtagacagattgagttggctattcgcatttcctcggtgttttcgtggaccccttctatgagctgatacgggtggttttttgggtattgtaggctgttgaatgacttgcatttctatgtctgtttccgttgaggaagaatcaacgtgaccgttgacttcttcaacctccattttaacagatttattgagaattacgttggcgtctttctcttcctcattgttagctgtctcgatatgaaaatcagtaatggtgcctctattcgaatcctcaaattttacaattgattctacatgagttttttcattttcctcagtattctcttgcgttaattccattattggaatttcagttgtctaagtctgtcaataagtaaaatctaaagaaagcgagcttaagcacagtacactaaatgcattaaaaggaactacaagccaaaccaaaatacaaaagaaatggggtctgtcaaaacaagttgaaatttaaacaagtcgtatattaatatcaagcttaattaaaggagacaattatttcaaccttgacggacgaactaaccatgcctatataactcacagaggttactgcggtatcttcaagaagattaaacaaaaaaaaaaaaaaaggaaagaacgcaaatacaccaaataataaatatttttagcccagataatctcatccaagacaatcactaatgtagcagaattggatagaaaacaagacaaaactgcaaaagaagattccattaaatttcgtgaaattaaatcaaatactcataaacacccaaatattaacccaatttgcgaaggccagctcgtgttctgtgtagctttttttggtttgcatatgcttcattagaaagctcgtctaacatggagttttgctcgacaacttcttgattaatcattttcgaaagctccttctgcctttgaataataggcaataacgattctgcttgcatatcttgatcttccatagtttgattctgcatgttgtacagtcctacattatcaagcttttttgttgtctgtgtctctggcattctgttttttccaaggactctgttcaaagaggtattagattgtttgtcagtagatgcagataatgggcgaaagggagaactaggattagaagagtttaattgagatgaggcagaaggaggagcgactgggctgtttgcatttttaactaaccgtttaaatgacaagaattcagaaccaagctgttctaacatatcttttcgtcgaaggatttctcctggaccaagagcatttgctaattctaatttgtctaacgattctgaaaggttatccattagcgactttattgcatagacattctttgtttgaactcctatcgtaatgctttttccactcattaagtcaactcggtacatatgtaaattacgtttacaatcttgaaatacttgaatccaatctgtcggacccaaaaactgaccctgtgtttcatcttccgattcatctttaatatttagaaattttttaaccacaggcatttttatccatggcgtttctgaaaggcattgaacgtaagcttgtaaagcaagtcgtcgagattcacgtaacttttcatttgtcacagttgaagaaacccaagatttagaggggagtttgcaaagtctactgttgtagtcatttggccgaatttgagcatccaaagcaacgaattcattgaaccgacgaaatacaacatgtttcccaccattcggaaatgctacttcaatatggtaaaccgtccatcgtgaatattcatcagaagactagttgtaagtaaaaattaaaggaataaagcttacttgagacgtttctggtattttaatttttagcgccatacttgctatgaacaggttgatcaacaatgagttcatgaacaacagactactgtatcggatttactgcactatcgttataaaactgtataatgtagaatttgagctttcaaatagtataggttctattagttgaataaagataaatttcagtttcatgatgctttagatcctttaaacctcatgttttccttgatgcgcgagatgcctttacgattatcgaattggcaggtattgaaagaaagtttaccagtttgcaatagatttagaaattaaaataatgaattaggttagtatattatcttatacctttaaacactttatagtcagattattgagtattttttttggcactcgtgaacggtgcaacttacaagtaattacaatacctaaacagaagaacggcaaaatcttaacgaagcttagtaataaacagaaattgtttattttctatattttcctacatggattggttgcaagcgcgacttgcctaaagtattaaaagcacagaataaacgccagatcgtaacattatgcaaaagtgtaagtataggtagattccaaataacaacagtactctgatatgcataaagatttttcacttaaaatacatgtcatgtaaatataaaggccccacagatgatatataatagtactagtggaacttaacaactgttttttcatatcacgagagggaaaaatatacagcgaaaagacttctcacatttgcttaaagtataaccatatactgcttttgaacgatcatccaattcaaactatgcgaccctaatagatgagaataaaggacgaaacatcccacaatggatatcttttaaaagagttcggaatcaatttgaaaccacagtcattaaattacatatattcatagtcagttccacacatgatgttcaactcagaaagaagaaatctgcctccttcatcagaaataaattccaccgtgaaaacgaaaaatgaaaaagagaagaaaaagggcattaacctgatgaaaaaagtttgacgttacctcactgaaattattgaacacgagtaaagacatatagacaaatttggaaaatcccataacagatacaatgaattaagataagcccatgagaacttccaccaggaagtaaacaaccaactaactacattacaagaaaaaaaatgatgtaaaagaaacagaactcgaactttacagagacaatgcccagcagataaaagtgataatccaaatttgtgacaagtaagcacccaccacttggaacatggcggaccaattcattgaaaacaaaattgaataaggaataaagcaattccacagagtaaggaaaatcatcaaaaataatgattggggaataggcctttcactaaacacgactctttgaataacgtaaccaattggtacatgggcaagatattgtaacgggagcggaggggcaacgagactagtaacaacgttatgggagtttccaagaataagaccgtttaagaatatcttttgtgatatataattaagcacgctgatcaatacactcgccataattgtgaataggaaagagacactatactgtgtgttgacttggtttgaacatttgatggggttagctctagagaaacagcgcgccactagcaaagaaatggcgtcaattatgaatgcccaagcaatttgactcaaaggagtaaggtagtaggtcgagagaagcacgtatactggatatttcgtaagtaaaagccatccataacctaggttgaatttctgcaacagaagagattgaccaacgtgcataataattgataaataactctttcaatccattgttagtaaatctaaacttatataatgatctgcataccatccagtaaggaatatcactttccaccacccccgtggaagctaataatcgtggattgaggtgataatttagcaagccataagttaacgtgtgtaaaaataggtaaatggacacctttatggtgtttgaagacgaacagcacttcgatcctgacattttgcgaatattggtagttttcatatagtttgtcatcgatgaacacacaagtaacgattgatcaggtaacagtatcttcaaacaatggagtctgtgaaatggtaaataatgaatcagcaggaaaccaggatcctttgaatttaggtagtaagtctatggaaaaccaaaattatatttttcttgaaattccgtgttattaaatctctaggattagtttgcaagaaagtgttctccgtgcaaacattagaaccgtgggattttaagcataaaatgggtacaaaatgaaatataaaaacaaagaatgaccgatgcctttattaccatgaataattatgtgttttgaattatccctaaaaaaaaaaaacattacctttattttcactttattaaaataattttaacttattcatggagttggttcattaacttaaatgatcgtaaataataatccaaaaaaccttatactgctaatttactagtacctttttttttattttattcttttttaaaaaagaaaaaaggggaaattagcgacatatattatggacttaaatttttctaagtacattactttacgtatatgcaacgattaaaatcaaactgaagtaaaaaggtgattttttataattcctaaagtcaaacaaaataattatttaataacataaaaaccatgaggtgattgacttgagcggtaatttaatatatcaaataatttatgttatttcaaatctctcttcccttaataatctgataatctatagtcactgagaacacatatataataaaaaatgtgctatttcaaaatatttattccattataggtagcttcatttttcatgagagaatcgccagtgtatattgaaaattcataaaaataaaaagctaaatatttcggacaattgagacaaaaaaacctataaatatatatgtacatattaaaataattttttgaaatttattagaataatcaagctcaagcttttgcattgaaaagaatttatacataaaacatgaatgtctaagtataaaaatttgaattaactagttgcttatatttctacctttgacataatgttattaaagaaaggaaataaatacatctgaacgaaataaattataagtttataggtaaaatggttatacaaaggtggaagtactgttggcgtaacttatttttctgaagcattaatgcaaacaccaaacccgtgccaacattaatactccatatctgaaagagataagttattctatatagtaaaaagctaaatgattatcaacaaagtcgatacaattgctatatcggattttatattcactgatactcaaagaatatcaaaatacaattactgcattctttacaaattctggatttctttttggtttaaaaagaattcattgaggcgatttgaggattagcagcatatatgtcaaacatttaaaagtgtaaacaaagtatagaagagctagcaaatagcggaaaaaggaacgcccaaaaactttattaatattaaatatagaaatttcttatgaaatggcaagtttaattcaaatatgccaaaaatctccttgttttaacaatcgagaaaacacaggaattcacaaaatagccatgtacttgaaagtccttcatcgcgaatgtattattgcatttaacatatattgttccaattgtactgccagacaaaccagaataatatttttaacaacatagcgtgttcaaaaactcaacttgacttttcatcaattaatcattttttgtcgaaatcgttacaagtatttgagagagcgtaatgattacattacttaaatccagctgatgatgtacaaaagataataattgcggtttttgaaaatgaaagcgaagtttagaaaagggcttgctatgtgcatactgaatgtttaagcaacataaagacgattctattcgaaaaccgtgcagaaatacaagacttgctgtttcgtttgctagatcaatcgatagtcaagattattttatacattaataaatagtaaggtaactgatcaatcaataaatttaaccaacaaattgtttctcgccatgtaatagttttagaattttttagatatttaccaaatagtgatacagagcgcgaatcatgatagtgagttcttgagaggactaccatatcgctttcatcgattacaagctagttaaatcattaaattatcttttgcattcggaacgatcttcctcactattccctttccttctgatgctattcgctcagttttcgcattccattaccaacttactcccctctctttcaatggtaagtaaagggatatcgagatgttgaaaacaatggtttggatcgattttaatcaatttcaattaggctagttcaactatttacaatattttcttccgaagaaactcttcattctacgcaactatatttgtgtctgctttttttgctaaaatgtatgtggaattgtgttgtttaactattatcgaatgattcaattatactaatgttctagtggatttgacgtttttacagacagtgtttggaagcgtgccaatgctggggtatgtattttcgattagtgaatgattgaagcgactgtggatatcgagtgctaacaagacgatagttaacatgggacgaggttaagcctcgttttctcaacaaagacgaagatgctgaggatgatgaataaaagaatcatttgactttggattttctcaattcttttgtttgttattgactgctttagcttattgttttctctcctttgaggactgattttgaacttgttttgaaatcaccaaataccccatttaaaaagtctatcttcagtgttatcgttccctttatgtttgcccacgctgtatgaagtgttgggtgcattcagttgcacgatttgaactggcaagcagctgtttaagattatagctggtttactaaataacgaacattatcattttcattaaaatacctaataaccagttttaaaagaactgctgtaagaagttggtaattattagtgtattcaaaatttcatctaccaggcgtgtgtgaacaccacatcactcagagttgaattgttttaaagcttgtaagtatatttttgaaaaagtaatttgaactatgagtgtgactcaacctttaccagacgttagttgcatacgatttgaaatcttcaaatacttacgaacaactcgttacatttcaaatttaatacattaacaagagtgtaagcttgctataaaatgagtctaatgcctcattggcaaaaatgaaaagagtgagaatagtaaataaaacttcaaaaaagtaatgagattatgcaaaaagcagattgtccatttaataacgggatagtttgatcttgaacaaacataagtcttcatgcaatagagctaatgcaaatatttaggtgaaccaggaaccacgatatgatttttaataacttaaccaaatcaaaattaaatacgataaaccacattatctgaaaacatgatcttgttctgagcgtccatttctttaagtgccacaatagcttcttctctcgaaaatcctacatcatcctcgatattattaattgattccaaaacatcttccaaagaggcacactcttctgagaacagctcggattttgtaagggaagccaaccgggccatgaacacagacatcttctcacgaggtaatgaaactgtgctctgctcgctcacagatgccgacacttcagaagccacgctagtgcctgtattgatgttacggtcactgctggctagctctctcgatgtagctggtaaggtcgagtgagtggaaggccatgataactgggtatttgatgttcctacattataggaaccagctgttccagcgatacttgaaccaatctccgaaccagattcttgactttgcgaagttgcattctgagatcgggtaactcttctcgatcccgaatcaatgaccatgtttgtatccatttcttcttcagattcctcaatatccatgtcatcggaattatcgtcttctgagtcaaactcttcaccagcctctaggcgttgttttttgtgcttcttccttttcggtttaacaacttcacgaaacaaagcataacgcaaaattttttccgcagcctttgcatctttgacttccacaactgagctcaaacgtgctttggcgtgagcagtacttaatcgaatcaaggtttctaaagtacgtgccgtcaagggacttgtgcgccgctggtttccttgtaaatcgtcatttcgtaacccacaataaatattggtaatgtactcagcggttgcttgattcagaatagggtggatacgagattttgcatactgaatatatttccgcacaaagttgatgttaagcaattctttcttcttcgttcgagcattcgcatgcaaaagacttgaaaatgtttcccagactggagtctcaacttcctgttcaacgttttccgtagagacaccagcagcgtttgtagctccaacgtttaatacactgtttaaggaatcacgaaccggcgtacctggctcaacaccaggaggcaagtaacgatgcattctcaatacatgctcactgagagcacggtcctttttatcatcgatatcatctgtaacaatgaaaagaaggtcaaaacgcgaaagcatagaatctggaagtgctatattttggtgaggatctttacgaatatcgtattgtccatatataggatttgcagcggcaatcacactacaccgagcattaagcgaagtatgaataccggctttagcaatcgtaactgtctgttgttccataacttcatgaatagcaactctatctatgtcactcatcttgtcaaactcatcaatgcaaaccacgccacggtctgctaataccatggcaccagcctctaaacgacgctcgccagtttctttatctgtggtcactgcagcagttaaacctacgccagaagaaccacgaccagtcgtagctatagcaagtggagcggtattaagtacaaatctaagaagttgagattttgcagtggacggatcaccaaccatcaaaatatttatatcaccacgaatatgagttccattcgtcaaatttttttcagttcctcccagaagaagaagtaaaattgcttgcttgacgtattcatagccataaatactgggagcaagactcgtagagagaagttcaaacacatttttttttctggccaatttatttatgttacgaatatcagcatcagtgatgtctaatgcaccaccaccaacatttcccaaaccaggtttattccctaacaaaacaacattgttcgctagcagcacagttcgaaacgtcgcgcttgtattaccagatgttttagaccccatagaacgatattgtcctactatattaacacgatcaccaggtttaacagtatcaactaagtcatcatccaacaaaatgtcaattgatctaggaagttgtcctggtggtgcacgttcaggcatttcctgaagagaaattgactgatgatcgcgaaaggtgctgaagccaaattctattgataggggattaccgttttcgtcttgtgttggatatacagtggattgaaagctaaggccgccattcatagtagcatcggcatattgtttgaaatgatgtctttttgtagcttcgcagtaatgaacagatttaattactttaggacgaacaaaagagcagcgcgtaacaattccttccagagaaatcatcttatttaaatgcatggctctcaaagtacgtggattcacatggtggtcaccaaacgatcccctgaaacccacgtaaaacagcttatcctttaggtccttatgaacaacaggatctatgagagtgctaactacatttctcaatgcctcatcaaaaggttccacatattcaagaggcttcaaaagaacaccatcagctaattctcggttgtaatcgcgcagttcatcaatattgacaattaaacgacgctgacccatgttaagcattctaaggattgcctcttggtacaaggtaacgttagcatcatcagtgtcatgttcaagatattcttgaaaaattctaacacggtctttaaaaacctcatctgctaacagctcagtcatttttataagcgctttttattaccgtcctataacttgtaaaaaaatatccaaaggtttccaattttatcatgcgatacctgcaagcaaatgtgttgatcgaatgctgtagggatttcgcgtataacttaagtgagttaaatcaaaccgcacaggttttaatacaatatccaatactagccttttacaggcttattactgccctccaaactttgataaagttttcgatagatgaagaagtattcttatgttggatggactatttcctttataactatacgaagttacaaaatgttacttgatcgaaaacgaaattgtaaatacataaatacaaaaaaagttattaaaagtgagttctttttgaatttctttcataatattaatatacaattttgaataatactgttctggtataatccacagtgaacagttcgttaacaattccaaagtttgtaatcgtaaagtcattaaacgaacagagagttgctaaaagaagtcaaccctcatactcacttaaaatatgagtgaaatagaagtagatatacttgaggatgaacaatgtgtttatctagagaaccattaaaaacacaagattaacatatgatgaagcgtaagggagtatgtggtaaattatatgcttgagatgtttatatagaaggtgactttcactctgcgagagaatacaaaacctcaccaacgtaataacttgtaactaaatttacgtttagcttaaaaagtctgaagaaatcacatgaacaacagatcatcttctatcgttctgccttctgttaaacttttcaagagttcgtataatcagctcttaaaaacaaataagttctcagaattatagtcataacatcagagacttgaggtatcaaattttaatttgtaagctccaatttatgtacattcgaaagtgaagaccattcgtacgtagcaattccctcaattaactcttcatcaggcgtggtcccgtatctattgcgaatgacttctccattcacatcaaatttcaagtctagccgatctcctaaatctagctgtattttgactttttcttcactgcaatctactacgcgaccggttttctctgaaatttcaggtgtacaagtaactgggtttaaatccatgactgtgaacctcatcaaacttccaataggaaattcagtatggaaagaattggaggataaggaaactggatgagaaacgtatttaggcgccacttttaatgaagctaaagatgctgaatcctcctcatcatttttagttaaatacgagtcaggaacatttgcaacgacggtagattcattggctgaaaaagtatcattagattcttgcatcaaacgtttcaatattcttgctttcttacgacgaagattccgagcttttgtagctgatgaaccagatccgggaggccgaactgaaatattattaacatggccatcgaattcagcatttaatttgctttttttattatcatcggaaacacccgtattatcgtcctcaactactaagttagttgacacctaaataatgggacttaccacttgaacgcaaggtattgctccaagtattttcagattctacactatctgataaaggggttgtaaaattttttccttcttctgaaggtttttcagtattttcacatcctcgatgaactttggtggtttcactagataatttgctaggagaggaaaagtagtattggctaggttcatcataatgtagataagatatttcttcaacagtaggaggcgtacttgaagaaggggcgacctcagattctactgcttcattttcggctttaaaggttccttgtggaaaagaaaactcgttcgccgtatttaaagaaactgacaccgatacattattagaagaaatcgtatctgaagaagattgtctcgctgtgtccgaactttcatcccctgaagaagaatcactggttgacgataggtcacttgaatctgaaactgagcttgaagattcggaagaggatgagtcagattccgaaggagttgaattctttgattgagaagtcaacaatgaattgagctctggttgctgtactattgaagctgaaacgaattcttggtgcaatgataaatcggaagcagaaatttgcttagcatgtagagactcatatttgttttgttgaaaatttgctttaaaaatagtatcattttcatttgaaattttcgactttttggtatttaaagcataattttcgggcatattagcgtattgacttatagatgacaagggggcatttctctttttagaaatccatgaatcattagcttgataacgaggtgaggcacgaccagctaaatcaactttttgcatcgtttcgggtgatagcatttgctgtttttgtgaagccttgctattcatgaatttagacgaccattctctaatattttctttaagttcatttggactatctagtcttagtacaagcacctcgcaacctctgtgtaagccttcagaccttggtaaagcacgaagctcaagagtatctgtctcttctaggaatagtccatacgacatagagacaggtaaagcgaatccgtccttagcgagttgtaaaaacatttcattaccaatggtgtaccttttaatactttcataacctgtgaagatagcgcgtttatcttctagtccggaaaagttgaatttgatgatattgtaaagtaaatcagccactaaactagatgagtctgataaatcaagttgggacgtatgaatccattgttttataggaaccaaaggttcacaactgctaactttcagcagcatattgactatatttttctattagttataacgagtgtttcgttgtgcagaggattttttgtgaacacctacaggttatgtgtttattttcataaaaagattatgattaaagaacttaactgaaaaaaatgcgtcaaagtaaaaaacctagtatgaagacttttttattgattgtgatggtttgtttacaagttctacacgttgtcaatttaacattgttaccatattattccgtaaagtaattaacgatgtgctactattttgttagaatcaatgcgtacaagaagtgtcatgtaaatactcacacacctgctgttatttaagacgttctgtttaccaccacatttacatgtttgctaacgcacgggctaaaaggcgttcaagggcatcttcaccgactcctgcaaggttgggaggatatgcgcctttgcgagtagagattacagaggaacagcgacaagatattaatgaagcttttaagctgtttgactctgataaagataatgctattgattatcatgagctcagggctgcgatgcgtgctttagggtttaatgcggaaaaatcagaggttttaaaaattctacgtgattttgataaaactggcaagggctacttacaaatggaggattttgttcgcgtcagtaagtgtgcacgtcttggcattgatatattttattagatggaaatttaaaatagggaagacacatacaactggcttgaaaatgagtttttttttaaatttctttttccactcttatatggcttgtcattcttcttctgttgaacgtgtttactaattagatatagtgacggaaaaaattgttgaacgagatccattagaagagattaaaagggcttttgagttatttgatgatgacgagacaggaaaaatcagtttaaggaatcttcgaagagttgcaaaagagcttaatgaaaacatcgacgatcaggaattggaagccatgattgaagaattcgaccttgatcaggatggagaaattaatgagcaagaatttatagcaattatgatggatgaagcataatggagaacacatgctaatttacttttttttcgtttacgtcaattaatagataaagtagcaattagcagggacacatgtctttcgttttaaattcttatttatatataacaaatctcttaagttcttccaacctgtttttctatcgtccaagcaaactgctaaagaaccctttatttttctgtttaggctctttcgaaactgatgtaacaggtttttccggttgtgctttctttttgtcaaaagaggtctgctgacctagatatgtaatagctaaatcaaagaataaaggctttgctggaatagccctaatatcagcgtctgtaagattccaagatggttctaattctgcaagcgtttgataactatcaagtgtttcaaccaacgacaagtttttaggtggttgatttatatttcccatggatgccaaactttgtaatagcaaaattttcttttttagctccttttcgtcttttttaagttcagggattatatcgaatgctataagatgtggcttttcttcaaagttgcgcaatatatcattcacctgttgtaaatacgaggcagctcgtacacacatcgcaagactcgccagtttatcctgtgcctggtaagcatcggcaatagcctggcagcgtttactcttagccaaagaaatttgggcttctagttgggcagtcataccagtatctcgtgcaataccgggcaattctttagcaatttcaatgttctatagcaatctattagtatttgtccctcctttctctttaaaaattatttcttctgaataaaagcaaagtcttaccttaataatagaatcatacaagctttgacgagatcgaagctgagcttgtgaagcaaccaattcggaatcattctcaactgccaagtctctttggatacggagcaatactacattgtaagccaagtaagtataacaaatagagagagtttggaatttttgctcgtcttcaaggcctgtgttatcaagaacgcttttggtaatttcttctgctctagcccatgcagcaagcagacgatctcttttagagtctatggttccaggagaatttttgacatcgtgaattgcatatagagccaatacgacatcaggatgctctatttttactctctgatctctccattcaatgactgtgatagtttgcaaggaatcttgttcatctccggtcatttgcaatatttcagaatcaacggaatttacatgctgaattacctcctcatccttcggtatacttgacaacatcaaaatgtctaatgacttggtctggttttgcaagccagttctttgagcaacgtatcgtaaattggaatcaatttgattttggagttctccaagtacactcttctcatgttcagcaagtgtatcaattttattttgcaagactaggaatgaaagtcgagaaatactaaaagcgctcaaagagccttcccaatctcgtttctcgtagtttagagtaccctcgatatatttggcaaaagcaatagcctccaaataaaagatatgatcgttgcaatcaaatgcattcgtaaaggaaaccaactcttttccaaattgatctgcacgttttaatctgcgcaatgcatgtcgacgttgactagatcgcaaaaaaacaaattgttgaaaagcacgatcagcattgaaaagtaaaatttcagcatatctataacaaaagaagtacataattagtcaatcggacattagcataatcctcttaccttttgtctactgaagattttggtttcccacctctctgtgtaatatgaagggattttcgtaatccatgaatgcgatgggacaaatattttatgtactcatttccttcataaaaatgatcagatctggcttccagtaataaaggaaaaatataaaaattagccatttgcttaatcaaaccagaaaacagtacttcgccggtgccatttttgagacataaaccaacggtgcttagattatcgcatcctaggcgtgaatcgttaaactgcaagttaacgatcactatgctatagttcattactttaactcacattatttggtaaatatctaaaagctattattaccaaggacgttgaaagcttaacatgcgggtccattaattactaattattaattgaatttggaatttaatatccacttcttaaaacgggctgtctgcatatcttcattgtccgattccacttgtttctacgtcgcttgctttagatctcttaactaaatattactaaaagagatactgttattatattagaccaaaaaaagcaatttaagtatacacttttgtcttactaaatattctcattaatcgtattcatagcatgtttataatcttataaaaattgatgctaatttcaacattataaggccactgaaggaattctatcgctaagctcatagattactaaagattatgaatgcggcatactatataataactgccaaattagtagtttacaatctctccaaactacttagaaaatgcgttgagtttgtagaagaagtatattgcgttatacagtattgtgagtggtgggtgataatatatttatcattgtaacagctaataactggactgagaatgatgctctgtttcaatctagacttctaattttaactactattttatatcaatatcaatggatgttttagtaaacaaacatatagtcttctgctattgttcaacaaattgagattaattggtatgtaagctacgcagtttggtatctgatttaaggatacgtagaactgcggtgagttttccttgtgacctattatattacaatacacaggttgtataagtagcaactgagtataggtattgtattaactgggttataatgttacctatcactaatatagctcataactgaactgaggaacgaggttcagcagtagctctatttatagtattcagataatattgatcttaatagattatcattaagatcaatctccatatcgtatcatacatggtacgatatataattagaacatgtgacatatagtgatactcaacgtagtgtatcatagcgtagtgtagtattgctgacatggtattccatgtagtgtattttgatgcgtaacgtaatgtttaatagcgattttagtgtagctcactgtctagcaattagtgttgcatacttttcaaagtatgataaaacgaagcaaggcatcgctattatagcgtattggtacgcagtacctaattaatgctaacttgtgcgtaaattgatattgacagcacaatgattcaatttcattccttaacaagagccatctctttttgttggatgcttagaacgcgtggatttttaggctattcaagcgtttggttttgatctatttatctattttatattttaatttcgcattttattttgcaatgttcaagttgaaactcaaacgtatataatcactattggtaaaaggctcttcaaaatgccagacgaaaagttacctcaatacaatgaagtttggaatgatttggagaagggttgtttacattcttgtccttcatattcagtcaataatcatgtaaacaatccaattgtcaaacaaaactcaacattaacacaaccatcgttacgaaaaaaaaatacaatggctgcacctgctagattaagaaagcgttcggaaaatgtgcgacttacacaagctagatatgcgatatttcatatcttccttcctttcattcttactttattgctttatcataatttttataattatttcgatcaggcattggcggatcttaattctgtggttaaatatgttattgaaactatagtgttaatatttacatacgtgatgacagtgattattgtttattgtaagtttttgagatgatttgaattcatgactaacgattttctagtttcattttcgttaattaaattagcgtttgaagaagcttatgtttatgcaccgtctgtagctaaagcgaatgaaggtctagctaaagcgattgcaggcctagctaaatatgtagctaaagcaattcaaggtttggctcatattattttatccttactgttgtttattctcgggctcgaagtaatagaacaagatgaagagactggcgacgttgaaatgtcgtctatgcgaggccaagcaattaccacagagccagcaagtgacaatacaatggctgaggaaaccgattgcaacacttctaaagatgtagaatcgggcagcaactaaaagtcatggctagagaaaaaaatcaaggggctgccaacagttgcgagggttttttttatttcatcactaattttcttactttcttgcaaaagtcacttttctcctttatttctattccttgtattattatcttatatgcatcatcacttaatcattttcgatgacagtcatcactatttttgtctctgttatagagcaaacacgatgtgtatttgtggtgctaggaaaattcatttaactaatgaatctgttgtcaattatagattaatcatcctctttattgttttaccaaattgatatacaatccttaattgtgactttgtaagatttgcgacttaaaaaattgttcaattaagacattactcaaaagatgcaaagtagtgatttaacctttttttttgttggatatatacgaaataaggattccattcatcattctcaagttttggagttttaaaaaccagtatatacagcaaatataagttgaaatttgtttctaagacaaataaaaacgaaaaaatcgaccttggagtagaacgagaacttcttaaacaatgcgatttcgcaattcctagtcagtagccaatttctgttcgagaaaatcaattaaatgaactctttcgtcctgcaaaccatccaacattcagcctaagcgaaaagtaattattcttcttatgtccatatcacttgtagctttacataaaatattggcaattacgcagtttgcaaatttctaagtctctactatattgcaatatgcagtttgtacaaataaccgagccataaataattttataaaatacgatatataactcatccttaaagaatgaggagtacagatttattttatattcttcttttactttcataatttcctaagttttttcaaataacagaaatagttgtatacaaatttcatatcacaaatcaaagactgataaacacgaattaacgcagcataacgaaattcattattatatttaacaaataatggttgcgctccttgtccgtattgtcttcgtgtaaatggtctcttgttctagtacttacttagtcttaccattttactggtatgcccaggagtcattgctttttaaaaaaataaaactaaaaataataaaagaaagaactttcgctcattgcatgtaaagcaactcgacgcgactattcaaattaccaaaagttcactgggtaaaacgtgacttgaagaaatacattcgctttgagttctttagtctgtagaaaccaaggaatagaatttgtgcaatattcatttatctaattatcaaatagcgttctggcataatacctatgctcggttaaaataacactcaatgaatgagaaccaaaaaagttttgactctgacaagtcggaaagcgaggatgaacaaaaaaatggaagagttaaagtaagaagcaggaaaactgacgataatgagggttatacttgggaaggtgaatatcagcgttcttgggatatcgtacaggaggacgcagagggtagtttagtaggcgttatcgctgggcttattcaaagcgggaaacgtaaaaggtatggcgtatcaaaattggttttcttatgttcttcatttgtttgttagttgcctatgttgggcatttggaaacatattagtcttttatagcatcgatgaacggtatactaacttgtcaatctgatttagacttcttagagatacaactccgttacaacgaggtattattagacacatggtcttggtgttagatttgagcaactctatggaggagcgtgattttcatcataagcggttcgaccttcagataaagtatgcttctgaatttgttcttgagttttttgaacaaaatcctatttcccaattatcgattataggcgtaatggatggaatcgctcatcggataactgatttgcatgggaatcctcaatcgcatattcagaagcttaaatctcttcgagattgtagtggaaacttctctcttcaaaatgctctcgaaatggctagagcttctttatcacacattgcttcccatggcactagagaagtccttatcatttttggttccatcttatcatcagaccctggcgacattttcaagacgattgatgctctggttcatgattctattcgtgtccgtatcgttggtttggctgctgaagtcgccatttgtaaagaaatttgtaataaaactaactcatctacgaaaaatgcctacggcgtagtcatcagtgaacaacattttcgcgaacttctactcgaaagcacaatacctcctgctactgattcggctaaaaccactgatgcttctttggtaatgatgggatttccttctaaggtcgttgagcaattgccaagtctttgtgcttgccattcaattccgtctcgtggtgggtttcattgtcctcgttgtaaagcaaaagtttgtactttaccgatcgaatgccctagttgttctctcgttctaatcctttcaacacatcttgctcgatcttatcatcatttgtttccattgaaaaactggagcgaaattccttggtccgcaaatccaaagtccactcattgctttgcgtgtcagttaccttttccgaagccgccggtttcaccgtttgacgaatctacttcatcgatgcggtatgcatgtccctcgtgtaaaaatcatttttgtttggattgcgatgtttttgcgcatgaacaacttcatgagtgttatggatgccaatgctccggaaattaaagtttcttttggtatattaatgaacgcatttatttataataattattttaaaatactattatgctacttattcacaaatatgtaaagagatatatatttcaatttacttatttaaagagatcgttgcttaactaccttatccggaagatagtgaaaatttgatctattgatgcttcagtaagtgttagagctgtatcatatataaaataaaaactaattaaaatgtggaaatgaatatatccctatatttacagatcagaggtcagtattgcagttgtagttgattacagaggaaacctgtttttgagaattccatttctcgactaaataagcaaccttctgaccgtacttgcttccccgaagagaaaccatgtgcttttttatatgcgtaatgacaaggtttttctcagctggttgaccaagttgaattatttgctgaattaaatagttgccatactgatcagatgcaatatcgattaaaggctgccttgttcggtcaactctcgcgtttgtaatttgttttagatataaggaaatgaaattttttgggccagacttaattgctttttcaatgaccttagaggcaaattggtcaatactaaattccactgcacgattcaataatgcatcaatgactcttttcaaatcctctccttgtccgttttctaccatgtgttgcaccacccagtttccccattgaccacgtgcaataccgtctaaatgaaaaatgatttcctcaatgcattcacgcttatctttctctacacagttctcaaacatattttggactacgagacttccattttccccgactgcaacttcgtgccattttcctctcaaggcattgtttacgcgattcatgacattaactggatactcgtaccattgcgtttcaaacaatttttgccagacatggcatgcatagtggtgcattattgtaacatcaatagtgaggaataactcgtccatcatagccagtttaatatcttctgtcacattatctattgccttttgaacaacgtggcatccgaaaggatctgttgccaattttaacatatttcccaacatggcagatcccatttgtcgaatttgtggggcagtgccatgctcaaaacatctttgaactaagaaattcccaaagcggttaagcatcagaggatggatttgagatattatggaatcaacaatgttttgtttcatatcataagaagaaattttcagcttctgttgaaggaatatcgaagattgctgatcattgcttacaataattttatcaattataacattccaatcatatacagcattcctttcagagatttttctgtatcgggcagctggttctcttgaagaagtagactcggggatgacagatgggttcgagttattcatagtttcccatatggactgtaaactggcggcactatttactcctttcgagtacgaagaactccgagaagagctgagtgagtatggctttaacgtgccagacgtattcgtactcaagttatttgtggatgccgagagattcacttcattcgaccaactatcacggttcttaactgtataagttccaagatcgacatcctctggagataatggtgttgacggtttagaattgctatatcgaacattggtacggatcgatggtaatgagttatgggattttagcttgcaattgtccgattggaaattagctaacgaagcctcataagggttaaaattcgaagaagatatccatggtgaaactgaaaaacgaaattttggatctccgtttctattagagttcaaattttcctcagaagaagatgcagacaatatattttcacctgttacgtttttgactgctgttccaaatacaggagcattcgtggatttaatactgttcgaacttaattttcgagaataattcaacgaacttgaaacatcagccaaagcagttgccgaaggaacagacaaagaatcctgcaatgacatgctcttaggagctgaagttgcgtatactgcatgctttttagtcccaacaacaggtcgaactaattctacagaaacagaggtagatgggttatgagcaaatgcatcattttgagaagaagccccatcagacatgatatttgcattagacaagagcgtttgtaattcttcaatatgtttcgttttggtacacaaatctcttttctgattgtcgatctctcgttgttgacgttgaacaacagtgcttaatgcatggagtttctttgtaatatcgaaataagattcgctttcactaacatttgaaagttcatttaattctgacttggaatgctccagcgattcagagattgaatgatttgcagaagtcgaaggtagccttaaatcaattgactgcataataaactctataaataaaaactaatatttaatggatatggttttttctgttctttcggaaattggatattggtggatgaagagttgctgacaccaggctataaatatccaaccaaaacaaatagtgtttaccaaggtaagttcactcagaaaaataaacaataacagaaacaaacaaaataaacaaaacaaacaccaatcgaagtaatatttgagaaaataagtagattaaggacaagtatatctaaaaaaattaaaagaaaaacaaaatatttgttagtatttttacaaagtaaaagatcaataacagtctcaaaaaaaaactttcttcacttttgaatgacaaaaacaaaaagaaccaaaaagtaaagtctttcaaaagattacaaccccaatgaattatttatatagaaaaacagagcacactcaacaatatttcaacattgaaatgaagaaataaagcatattatttcaaaagcttatcaaagaaggggataagggtttgagccatggtaaatgaaaaaacaagcttaggaccagttgtcaacaatttgggagtcaaccctttaaagaacgaggtaggtccttcgaatttaagcatatttttcaaaatagtaaacccggattgagggttatcaaaattcttattttgaatacgagttttaataacatcgagaggggcagagacaatcaaactagcagaagcaccagcgattgaggtgaaaaaattttgaaaaaaagtggcttgagagtaatcctttagtttaaatatgtactccttagcaaaagcgttaccaccaaagagtgcaaaagaacctggggcattgcgggcggcagtccatccccatccacgatacaacgcaaatttctcatcagcgagaattctgaaaacaccgcgacctttaaaagctgcaggattggtttggcgcttaattttcaggacgtctaagggaaggaggaagatctctccaattccaacgatactgaaaagttagtaagctatacacatcttgaattcccttttcaacaatcttaaacataagctttcagcttagttaaacaaatattcgacagatacataccttccagcagtagcatgcataatggcttttccagatccctttccaaaagttttatcaaaagtatgtctataattttcattcaaaaagtcttttacctgaacatgttagtaaagatgaacgagtatactgaagccaactgcgatacattaattccgccatcaaggcttggaaaaaacgtacgctttaaactaccagtataagtactctacaacatacaattggttgaccgctatatttataaatacgttgtacaattttgtagcaagcagcatagcccaaaccaggaaaaagagaggtagccttttggagtagaggagcagaggcagcatctctgaaaattacagtgttaagttgagttaaagaagtaatttttccatgatttgacatcaaacgcttggaaattgtatcaacaggatgaaagagtgaaagttcgagaattccggcagatgctgatcccacaattcgagcggtttgcgactctttgtttttcaactgaacaggagccatctttctctatctatttaaaaatttaattaataaccaaaaagtttcgttgtgttgaaaaagaaaagttaaaggattttagtgtagtgaacttttattgaaatttttttcattttttgataagaactgatagccttcgttttagagataagatgaaatatcgttgttctcaaatagtgatctatgtttttctgttaatatttttaaacgtttgaaataattccaaaaacacaaatcctattaatgtaagtttgcaaaaaatctcatgcatatggctttgatgaaacgtgtggacatacaaaatatctgaattctaactgtttcaattgcttcagacgaaaacttttaagaacgttcttactgaaagtttcttttacttgtttcatcgtaaatatagtcatcgaacagatatttaatgaacttttggaatgcgtctcacgtgtatttcggtttgattaagtagttaaaagtgatatactatgcttcaaatcgaaataccagcatgtaatttgatatgcaaagtatttctttaaaaaaagagcagatggtttcaagatatgtcttcaatatttaatgtccatgtcttttcagaatttatttgagtaaattacgtgcaattacacgtttaacatgatttaaatgtatagctcttcaatcctttctacatatgagagggagtgtaatataattgccatttagtagcctaatggaatgatcattgtttaaagcattgttatattacagcgcttaataggtagttgggcatttgaaagtatcgtaatatttctgtaatgaactatgtcttaacttgcggtaagtaggaaaccgctgcagcatgtgatgagaggttacacgctttcaacctttcgtttgccatacacagttgaagttgtgagagacaaatttttaatataaaccggttataatgcctcctgcagtgagctctgaaacctctacaatcgtcccacagcaagttgtaagtagaaaatttgagaaacttttttattaaccattggttagattgtgcatccattagtacttctgtcagcagtagattcttataatcgatctgccaagggaaccaaaagacgggtcgttggtattctattgggtcaaaataatggcgacgttgtaaacgtggccaatagttatgctataccatttgaggaagatgaaaagaatgcatcggtttggtttttggaccataattttatggaatcaatgaatgaaatgtttaaaaaaatcaatgcaaatgaaaaattagttggctggtatcatactggaccacaactccgaccctctgatttggaaatcaacaacttacttaaaaaatacatacccaatcccgttcttgtcattatcgatgtaaagcccaaatcagtgggtcttccgactaatgcctactttgccattgatgaaattgaagacgacggctctaagtccagcagaacttttgttcatctaccctccagtatagaggcagaggaagcagaggaaattggtgttgaacacttgttacgtgatactcgtgatgcatccgttggtactttagcgacaagagttacccagcaggcacaatctttacaaggccttgggcagcgtctcactgaaatcgcagattacttaaggaaagtcgtggatgggcaactacctataaatcatgctatccttgccgagcttcagagtgtgtttaatcttttgcctaacatttttagcggtcctgtggtttcagaacaggccttggaatcagaggcacaacgtgctttcaatgtgaattccaatgatcagttgatgtccatttatatttccagcatcgtgagggccgtgattgctcttcatgatcttttggattctttggctgctagtaaagctatggaacagcaggacataaagccaactgttcaaaatggagaagtttcggctaatgccgaacaaaaggcttaatcactgtattcatactatccatgtctggcttctatcatttgtggactcctctttctgagatttaacgactttatctaacgtaggttttttatttcaatgtctaagtatcatagagtttttatttatatcttgtcttttcgcagacagttttgcagatatttgtaaccctcttaacttgtaaaagttacacgtcgggttcgggtttatttgcttgtatgttaaaaatgatatgtctacgtttgttaaattgtatttacgaaggataaaagtgtaattttaagttagtacgaagaaattgcatacaaaatatcatattttaatttacagtgatatgatggatagcttgagaaaaaacttttcatgaaaagaaatcctagcaaacgccaaggtgtcaatgttaaaaagtaggctgacattatattaatgaagtaaaagggaatagggatacgcgtacaggtgaccagcatctctttctttgagctctttgatgaaagtaggttctaaggaagttaaaagaaacagaaaaacagcaaaagaagtaattcgcatttttggttttaatatccatttgattcaaaaagctgccatgcctcgaaacagtgagaaccattaggatctccttggcagctagaaatatcgataatagagcatataagtaacgcatccacactgtgaaaaagttagtattttacgcgaggataactaaatataattactcacatcatgctgaggccgccctctatggcgccaatgataagccaagcaaggaatccgcctaaaagtcctacaatgtagccataaaagacaccattttcatgaatggaataattccacgaagtaacgccaactcctatagcgaggagggaacgagcggctagcaaagtgtatttagaaaaatagtaggaacgtcggcgtaatcctactcggttcaattgttcgatttgatacaaagccttggacgcattcatgtacgggactgagtaaattgatgcgtatgctagggtaagaggagatgtgacatacgaagcagacgtctttgaaaacatataatatacaatacgcgaaacgtgtcttagccatgtgggtaggaaatgcaatggtactttggtgataacaactaaaaaggaagaaaaggcacataaaccatactgattggaaacaacgtgatagaaaaagtgagaaactaaattggttttggtagccgaagacttagtatcacgataaaaaaaccattgagaaacaattgaagaaataatagcgctacaattgtgttagtaaaaaatccggccaaagcaatataataacataccattgaagagcatgaaaaaatgtgcacaaccataagaaatgaagtgaataaaaggaggccaagacccaagaacttctcggcaaaacccatacagaaccaacaagggtagaaccgcgcaaaaataagcgggcaaacaatcttacccatataaagattaaaacataaaacgaaaacaagaagctgatgaatattaaagtgatttgaggaatatcagctataacacgacaagcaagccgaataatattaaaggaagtttcaaaatgaatacgacgccgccaaacataatatgaaagcagaatgggtgcaacaagcaaaattatcccagttaatagcatcaactttggttgaattgacgtttccaagtggatcctagacgcttttaacaagtagacagcaaaagcaaacatggtcaatgggaccgatgctagcaggaagtacagaaaacgaggaattgcgacaagacagaagagccatataactgaaagcatcatacaaataatcgcatctttatgaaataatggaaatgctttttgtattgctgcgtaaggagaagtggctggaggaatattaggatttgtccgccaaaccatcaggaagctataggtaaagagagccaacgtcaaaaatccaaatgttaatccccattttcgatctggaaccttctgttctgatggaagatgggcatcataaggtaattccgtatattcttcatttacgctttcatgagatatagtctgtggattcggttgaacacctaaattttcggagaaatttccattgtaaatagaattctctttagaaaataactcgttttcgttccttgaaatatgagagtttgactgctcttgttctcgtaattgccaatggatagacccagaatctatcaaggagttcaaaccatgcaaactcgaagacccggcgctcaaatcagtctcatgactatcaattgagctatttctgtctatgctaacactctgaagattcgatcttgaggtaggatatttaaaattgcgctggtcaacagaagagaatcttgattgtgcaagaaaacgcgaagcatctactcgttagtgtaactttcttctattactacttacaatcgctaaacatagatttgcttcacgtatataaaatcactttactagtcaatttgaaggagttttggaaattggtcgttgggtgcaaagggttactcattcctctccattgaaatctatatgacgaagatggtagcactttgtggcactaacaaatatatccgttaagcttaattggaaaccttctactactatgaatttaataaccgacctctacatttgcaaaaattgcaattaaatgtttttgctaatacgatttactgtcgttataatagaatgggtatcaagtatgtttacattgaaaataatgatcaatttcttcataaaaacgataaaggagaagaagataacttcaggtactttaataaaatgcaatgcctacggctaaagcctaaggaagaattacccggttccgtaggagataagcattaaatccgctataattcaacagaagatatgtcaaaataaaattatcattttgaccaacgaactgatttaaaagctaaaaagttgctcatttcagtcttatgcaatgcagcggtttaatttacaaaatgatttctataaaaaatcgctgtttcaagattaaaatgttctacgtgcaataatattataccatcaacctctaaataagagagacattagcatattaaaaaaaaagataggcaaaaggaagcaaaaactttaactgctcaagctaactgtatcgcattaaaatgaaatttttctccgttttttattagaagttttggtaaccgtgttttcggtgtttagcttgtgtttagacgatgaagttgatttcctcttgtattgcaaaatataggcctgttgattcaaaactcgatcaatactggaattggaaacgaaatcatcgtcaaatttaagccaaacaccattactacttttgcaaaacgaataataatggccgcttcgggtacttccgcctgcatgtacaagaaccccaattaattcgtaccaacaagaacaattgggatctgacatatacggaccgagattgaatgattcagggtatgaaatttgcttactgattttgctagattggaaaccgttgaatgtgaaccgcttgaagtgaatggttaaaatatttggtgcccgataaatagtcatttgcttggacgcatccaccagttgcttacaattttcacatcgatatttgttttgtttggtaagtttttctgcatgcacaaaatgctttaaggaatctgccaaggaggagcccttcgcatccacagataagtcaagtaaagcttggtaggtgttggaaggttttttacaaactgagcatagaatctgctggcgtaggtaaccaccaaaaattctgtgtactaccgaagtctccctgcttggatgatcaagatttttatggttttgaagacaagacttttgccaagcatcaaccaaatatcgcataaattcatgagcatcttcttggcgatatgggcggaaatgactggaaattactttgagcatactttgtatacctgaaggtttgaaggccgaagctcgtttggtgcctttgttgggataggcacgggcgacatgttgctccattctacagagtacacatgcattcatacggcaggataaagaatgttgaccggataaaagatattgaaccaacggtggagtttgagtcatcaactgaagtactgaattcatgaaacaagtattaccgagatttacgagccccggagcattgggcatgatattatcccattccatcgacaatttttcttcgggaaatagaatgcgagccggaggtataaaagcaggatcctcatccacaaaatcattagctccatcaccccttgttcctgaagattttttgtattcctgggaagaagaaccagaacgtttgtttctagttggggaagtaggcgctgaaaatgacttacggctaacagtagattgctttggattgtttaagacagtgtaagtaccttcaggaaccgatggtgaggaaacaaccgcgggacgaaagcgaacgggatttttaagcaaatcatctagtgaatgcttgactgcaaaatctagtgactgtccttgtaaagtagcaagcgacatgtcaacaacggaatggaaaaacaacaagcaatcaaaaatttgaaattatgaagaaaaatgttagaaaagaagaaaaaaaaaagctatcttttaaagcaagaaacgtagaaaagaagagtgatgcttttcacaattatcttcaagagctattgtgaacggagtaagcagtttgatgtaaacaatcaacaaaaacgaatgtaaacaaacttattcgtgagttgtcgaaaataaaaacaccaaaaataaaataaagcaaaaaaaaagcgttcaatgagaaaatttaaactcacaaattattttgaaatgaccagccactataggtgtagtaaatgaatttagaaaaaaataatgcaaaggtggtaaagcagacgaaaccgtagataaagtgattaaaattacttttaaatgaaaaggatataaagtgatgcaaaaaattcggcgggtaattagaaacgaggatttgacgtgttttcaaaaatttgatagaacgtaacaaaaaaactatataataataaaccaggcaacttttgtgtgtttcgaatatttttgaaagtaatgtataaataaaaaatggaagttatccagctctacgatttaacactccatagaacaaaaaagaggataaagagacaacgacacgtgctttcgcgttttatatttttaaacgcggaaagcaataaaaacaatcaacttcttaacaactaagggaaaagaactcgccagaaaactggtaatactactgtaacgtaaacaaacgtcgttacccacgaaagacaaaaaagtcggaaaaggatatggatatctaatgtacgaaaacaactttatggatccaaaagtaatatcttcctcaagtccttccccaattgtctcgccggtactgtgaaaagggagaaatcgctattttttgaaaatttttcgtgtcgataaagtcgcgttatttttcgttatttttcgttatctttctcagcgcatcaatccaaactgaccttgaactgtattaatctgacctaacaatactatgtactgcagtgtaatctcgttaaagtaatttaagaaatttcattatgcagacataatgatgcgttaggctgaaaaccgtctagtggtattgtttaaaaaagatggccgtgctattgaactaagaagtttagtaggacagtaatgttttattatattatattctttaggtaagttaactatagcaatgaatctttatcactagaatctgactatgggtgacttataggttatggcgataggtaacgcaatttagtatcgtttccttggtcaaaacctgaaataaagatctgggaacaaagtcaaatattgtttagcatgtagtatataaatatattatttaatctttataattatcattatcttcttagcttacactatgttgtcacattaattttttttatttttttatttttttgcgttgacaggtagaattcccttcaacgtgtaaataaaactactattttccatatgcaatttcattgatttgaaaatattttctaaaatcctaacatcaatcgatttattgtttattgtttttttttttgaaatcaatgttatagattctgaaacagtcattttttccaaaaggttttcagacctaataattagaatatgaacactaaattgctgtgagtactaatatagtaaactttattccttcaactttggtattttatttaatttatcactttttggaagcattacttcaactagaatttttataatatgaacaaagcgtttgtctggattgattgtaaaaaattgcaaaacgaacgaaaacactctacagaatagcaccagtgtattgtaatcgggatttaaaattagaagtatttctgaattatctggtccattttaaataaattatcgcacgttttcgctaagagtaagcataaaggtgtaacaatattcacatccattgagttaacaaattcattgtttattttttatttttaatgcttggttaaattacattttaattttaattttttaaacggaactaaatatctatttggagtctattatactgaaattgaaatggattatttactcgaataccttgtaaacaattggtgttcttgttatttacacaattccacaaaagtaaggataatttactgcatcttaattttagtatcctcattatgctaaatcaattagacaatccaaaaaccacatgcagtgaacgaatagtattttatagctgtattttttgatcgtcaagtattgcaaagcgacatctcactataaaacaatttcgatttgaaaaaatgctatctgcataagatattctatagccaaatgaaataatatccgctggtcataaaggttaagtttgaagaaatgcaattcccaagtactaggtacttgaagtatatgtttacaattcgattaggtacatatttaaactgtaccgtttaaaattgcataaaaacattgaatcaaactttttttatttttttgtttaaaatttttgcctatctataattagcaagatgtgatacaattgtgatatttagtcttgcaaaaatactcatcatggatcgtattttcaatagaaacctaacaaagtgttttgagaatgttttgttttataataatagaaagcatgcaaaaacacttgtaccttctgctaaacaagttttctttgaatacgaatcgaaaacattgctttctacaacggagagtaacaaagtgacaacgaaaccctagtccaccgaaaagttgtcttctgcaaagcacagaaattacccattgaggtttcttccgcggtcaattgtattgagaaatcgaatttcaaagatgcaaattttaaaagatcaggagaacttaaatcccgatggaggtagctttgttttaattacaccgccattgtctcctcctaaacagaaatctttatcatatacaaatatttcgaggagacatggcatgcgagcttgcatgaaaggaattgtttacgaagtttacaaaaatcaaccgaaactttggttgcagcaagaattaatatggttgcgtcgtaaacggattcatccaattcctaaagctcgtcgtaataatcatgtaggtcgatgggctaacaggcattccaatgtctcttcatcttctggctctcgcggacgcagtagtgtctcttctcgagactcgtcaccaagttacagcggtgctctccggtctgctgaaagaagcatctcttctagtccttccactattgaggcccgtagaagaaaatcggctcgtggaaatgggcttaatggtgccatcgatgttgccaaccttccctttgaagagttgccgaatttctgtcctgacatgtctgtactggacaaccgtacgcatcctcgtacactaaaagctgagtggaaaggtccgcctttggaccttagtgatgacccttatcgcgatctcttgcaccctgctgaattacatttggcttcgactcttcgtcttccatgtttgatttatcttgataacaaaaaaagaatatttgcggaatggcatcatcgtcgtcaacaaggacttacttttcgaaaaactgatgctcaaagggctagtcgagttgacgtaaacaaagccagccgtttatggaaggcatttcatgaagtcggctttttcgacgattaaaccttttaccttctgtgctaagatggaaatattttgttgaatcacccatcttgctctccaaataccctttcataccaaatttgcttttattgttattttctctgcttaaaagactttactaccccatttaccaatttttaaaaaagtctttctttttgtacactcagcaaagtgttaacttaaagctacattttgtgcttgtttatactttgtaaccattttatacccttcttttctcttcagatttttggttggtatgcttaattaagcttaattcgttctttatattgtcttcttttcattttattatgatccttgtatttaaaaaaaagagaagctattgtatatatggtctttgggagtgccgtttgtattttctaacattgtacctagtatatcatgcttttaaaaaaaggctacctaaaaaatgctcaaaaatttttgatgagaggctgtgttcttccaactctctactctccattttgattcctttatttatacttaattatatatttaaaagcagaaaaatgaggtagaaaatactttgcgatcatccttgttgaagcattttctttaataatcattctttttatattcctcagtatttcttaagattttgtgacatatttaatgcatctttccattgtagtagtaactaacaattcggcttttttctttgagctttttgcattttcaattatttacattttccatactactcaattagtcaatgttacctatatgatatcgtcacttgtttttttgtaaaaattgagggtagggttaaacacaacacattgtgactgctttgattagacaatttgaaagactaaaagcacaatcgtccccaacccaacccatattaacaatggcaaatctgagaacacagaagcgtcttgctgcctctgttttaaaatgcggcaagcgcaaagtttggatggatcccaatgagatcagtgaaattagcaatgctaacagccgtcaaaatatccgcaaattggtcaaggatggtttggtcattcgcaagcccaatttgatgcactctcgtttccgtatccgtaaaactcatgctgccaagcgtcttggtcgtcacaccggttatggtaagcgtaagggtactgctgaggctcgtatgccctctactgttgtttggatgcgtcgtcaacgtgtcttgcgtcgtctccttcgcaagtaccgtgagtctggtaagatagataagcatctttaccacactctttatttggaagccaagggtaacaccttcaagcacaaacgtgccttgattgaacatatccaacgtgccaaggccgaggccaaccgtaccaagttgatccaagagcaacaagatgctcgtcgtgctcgtgccaaggctgcccgtcaacgtagagccaaggctgttgaagaaaaacgtgagcaaatttacactgctgccgaaaagatcgaggaataattgccttaatacatttatgttttgacatatgcacttttggtttaggcggtaaattaatttttcaatagtgttttaaatatactatgcttgttgtgtacattagtaaggtgaaacgaattcgtagattgtagaactttctcctttgacaaatgacttcggactggaagttaaaaaattttttcaattcatctgtactaattaatctatgagtatgttatgtcgttcatagttaaacagcactaagtttaaactactgaggtattgtgttttattattgatttgtaacatataatcatttatagtagttgtctaagcacattccatgtactatctatctatctatagtcctgttttcaagaacacacaacgataagcgttgtactatccctcaacctgcaccatggttgtaacggtcaaatcaatatatgcaaaggattgtatttaatgaatagccaaatccttgaagtttcgatttgtttgtttacatacttatttatgaaaaatcacacttcgttggcatggcaaccacctgctcatttgctttcctcactcatactggaagagagaaaagtatccgtctcccaaaatatgaatttatagcattttctattatatcgcaatttcacatagattaatctacaaggcagttattacctgtttgcttgcttttcgatatcttgttgtacccgaattgcatacctaggcgatttttacttggttctaatctcaaattcacgatttttaagttattattgtgctaaaagatttacgcaacatagtattgaagctctgttgtgcttcccttaaggacccatcactcttttgcatataccggtcatttcttttgtaaatatatacataatcgagtgtgctaagctattctatttctatacttaactcatgtatcgaaaatgggatttatgtataacacgacacttgctcccttatatagagcatagcgttataccgataattgctctcttggttttgtcattaatattttacattctttacatatgctttgggaccacttcgtatatattaagcggaattatactcggtgcgtatgtaaacagcttatttcacaacaatcatagtgttatcttgaatatcaagcatcctgagttgggtgaaccacttaagccatatcaaactcctttaccacctgaacttgaagctcctttacaactattgatttcaaagcttacgcaacattacatcaatggttggtataaacacgttagtgaagatccatcttttattcgcgaggttcaaagcaccatagaatatattatgcgacaattttatgcatatgtgagttctcaggaatcctcgcatataatttatgaacttttaaaaaatgccatttctactactacgttagttttgtcggatttaaatcattttcggagcaaaaaaatccctctcactgaatttgctcttcgttatcccgagtcggctgtttcgaaactacttgatcaggcgtccattgaaagaactttacgcgcgcaagcttctgctatgatagttaagtttagccgacctgaagactcagcttgtcttcctttacattgtttgctgagagaagttcttgcaatgcaagtatttaagcgtatcacaacacattgttcttctccaaggttcgtgaatcgctgtattattctttatttttcttcaagtgaggataagagtgattgtttggcaaagaaaaattatgttaacaagtgtcttatggccaaggcacttaaagattaccccgttcataccaatattgatcctgatgcagggaagttatcatttgacgatgctttttacgaagctcacattgaacttcattatcaatttttgaaggaggcttccctaaatacccttattaaagataaaaaaatgctcaagtttattatcactgttcgtcccgttcatttgcatgtctcaccttgggtggtttatcgtcgatatcgggggttcaaaactttatactatttgttaaaaaagcaaagtgctagaaatgggcgagctgtaccgagttttcctgtttggcgtggaaacacgtatgagaagtttcgtgaaggattgtatttttttatagaagctttactgcatgatagtcactttgcaactaatgttgatgtccgcaagttttttgcaaaatctatgaggtctcacccattagttgatgacatttacaatggatttgatgtagataagaaacatcaatcttcctctgtacccacattacccaatcttacaaatattagccgagtgttaagcaataaaacatctaaaagtgcaaaaccaaagcgttctgagcgaactgggctgttgagtcatcaaagtacattggcacctgaaccacttagccaacaaagggatagctttgaactttgtaccaccggctatagagataccggttcatgtacttcggatgatgaggattcgattcatgagccttaccgtcccgcttccactcaaccaactgaaaaccccccagcgatgcctgatcataacggaagtccaaccactgagccacctaaaccaaacgcttttgaattaaaagaagaacgtcttaaagaaattatcagcgggggatttgctctggttgatgagctttgctctctgaattccaagttgtggttttttcgaaaatcagttttaacgattatgaagacgacagtattgcatggtcctgggaggttctcggctcaagttgaacgaatgttaaagaaccaaatttatgacaagctttcaaacactcaactagtgggagatttattaacttcgttaatcttaaacgtatggcccgacgaaaaaaaagccatggaatcacattcgacaagggcacacagacgttcaactgaatctaaaatttcctttgatagcgaagccgattcccttttcgaagaggctagcaaatctgttcctgaagaccctgtttcagttttttgtgacgaggaaagcgatgaaagtttgagattacgagccgaaaaaacccttgttgaaaacgctttatctgagaattttactcttatgcttggacagtcaacctccgaggaaagcctaaaaattattttcgaactgcttcaagaaccgcaattcgtgcaagggttccttgcacatttacttagcaatgctcttcgtagcatcatatagtcaatcaaggtatatcgcaagtgtgccgtatatttatttcttttcgccgatatatacctggcattttaatgatttttacttctttcccttttttatcattttgtttcccttctcttacattttaaaattccattagcttttggtcgatacgtgatgaccggtttcatgattaatcgcaaaatcaaacgaacctttagaaccattcccttgttttctacctcgtttgttaatattttattatcctactttcttttatatatttatttataaaatcgtattttcgactttaccttgctttaagatttgtttgtttaaagttggcgaagtcgagaactatcttctctatctttagtcaagtttgcgttaatttatacatattgagtttcgtttattcggttaattgttcgttccgttttacaagcaatctagctttttgtgtaagaaaaagttagacgtgtatatgtttagaaaatttagttgtaggaactatgatattaattgacaatcatattctgacacaagtggtcaattgaattggattgttcaacttaagagaccaagttttggcggattaagcataatttttgttaacagaatgacttgaagcaactaccaaattgttgacatagcagtacccaaaattttacgaaggatgaaattttttaaagcagaaaacgttcgttaattttgagattaacagtaattctagcatcttcaaagtttgatgtttgctcaacaagtttttgtttttacggatagcgacaggagtgtaatacctctggtttcgagaaaacttaaatatgagaagtttaaacaaaataataatgcattttcggttggggtttcagcatgaacttgcaaaactgaaaagatactcaattcaaacttcaaaatattcttttaaagaaaactgtagtctagtaatcatactgctattatagaaaaatataatcttacgcaagaacagattccgctgaaattcgcaatgcttatttaacgaaaacgactttagtgaagttttaataatttctaagaacgtaaaataccgagtaattggattcccatttgctagtatgttctgaccagaactaacacatcttttgcgaaataaccatgtcggaaagagacactgctttagagaaatataaatcctatttattacaacatcgagaatgggattcaaaactgaaggatttgcgttttggaaatcgagatctagtcaagaaatatgataaaacagaggatgatataaaaagcttgcagtcggttggtcagattattggagaagtattgaaacaacttgattctgaaagattcattgtaaaagctaggtaagtaattactcaaacttttgggagattgtttgctttacgtggaggatatatacaagtgaaatgtgaaaatggatgtgaagaccttattattagtaatgcatatgttgggcgttgaattccttcataaagaattttttgtggcgtatgaatgggaaccatgtttaaatgcatataatcatttgcccgttcctttttttttttaaagataagttcagtgggcaaaatctgtgttcaaaaactgtttggttctaacctctccatccagcaaaaattctttttgaaatgcgcacacggtataaaaatctataaccggaagcatgaaacactctgtttactggtttcatagcaaatcgttgggaaagtagatacctcacgtatagtcatccttctctttttacaaatctatcgttgcattagtacactattttttatttcctttcattattttctgtttccctaacctattctagctctggtccacgttacgttgtaggttgcagaaacaatgtcgaccaatctcatttggttcaaggcgttcgtgtatctttagatatgaccacgttaaccattatgcgtattcttcctcgtgaggttgatcctctcgtttacaatatgtcaattgaagaccctggtgacatttctttcgccggtgtcggtggcttgaatgaacaaattcgtgaattgcgtgaagttattgaactacctttaaagaatccggaattattccttcgtgtgggaattaagccaccaaaaggtgttttgctctatggtcctcctggtactggtaaaactcttttagctcgtgccgtggcggcatctttaggtgttaactttttaaaagtagtttccagtgctatcgttgataaatatattggagaatctgctagaataattcgtgaaatgtttggctatgcaaaagagcatgagccatgtgttatttttatggacgaaattgatgctattggtggtagaagattctctgaaggaacatctgctgatcgtgaaattcagcgtacattgatggaattattgaatcagatggatggtttcgattaccttggccaaacgaaaattatcatggcgacaaatcgtcctgatactctagatcctgccttgcttcgtcctggtcgtctagatcgtaaaattgaaattcccctaccaaacgaagttggtcgtatggagattttgaaaatccatttagaaaaagtctctaaacaaggcgaaattgactatgaagcattggttaaactgacagatggaacaaatggtgctgacttgcggaatgtggttacagaagcaggattcatagccattaaagaagatcgcgactatgtcattcagtccgatttaatgtccgcagctcgtaaggttgctgacctgaagaaacttgaaggtacaattgattaccaaaagctttagtgcacatatatccaaaaagccatgaaatgataagtttaccgatgaagattatacgcgcaactgcatagttatgattaaaaaggtcgaatagtaagtgaaacgtttacttttaatatattccgactcttttggcttttatcatgtatatatgaatatgcttgatgggaatctatgtatattatcgtaaggcatatctgtgatagtacaaactgattttcttcaatatttgattatgttttccatatcctccaaataccaaacattgtttttccactctacataatttactggcgacaaaagaaaaaatgatcaagtaaaaataaacaattaattatacacatgaattaaaagtaaagcaaatgtttgactagaaattattaactaaccaaatgcactgaagtgtaaagaacgaactaaatatattgaacgaaacccggttcaaaaatgcaaaaattcttctcttcccaggaaggatagtttgaagttatccttaaaaggtagtagacctttgacaaagaaacgaggaaaaacgtctagtacgctaagataaaagaataagagaggtgaaaatcatagctggcttcatataagcagccaaactagttattatagtactagatgaagctgaatgcgcagtttagaagtcattttatcccataatttcaagaaagtaaaggcaagataaagatagccagatagagtcattgaaaaagacgacgaaaaggcgtaaaacaaagagcgcagaaatgaataatctaaaaaattacaaatgaagtattaacgtattaaaaggaaaaaagtatgaaacgcaaataactgataataaaatgattagcaagctagtttctttaaaatcggcgtacagtttccctctttttgtttgtcaaagaagagtaagcgtaggaaatgccagtattccctttgtaaagacatgtacgaaaattaaagcaactgtaccaagataaccaaagaggctgttagaaacaatttttttagacttgttgctcgacagtctcaaatgccgattcaacaggaggctcaaagaaagcagcgtgtccgaatacacagacacaggaagcaccaactaaccaaatgatagtttcgatgggagatgcgaacagcccaagaggaatcaacacgcatgctagaatgacataaagattttggttggaaattacacgatggctaagttgtaaatcagctccttgaagcttacgaataccataaacaccaccaacaccaattccaatgacaattaaaagtaaagggttacggataagtgcgtaaataacgagcatagcaatgattgcaagatagttagaagaaaacctcgaaaagttgaagctaattctcgactgagcttcactgaaattcctaggtctagaaattctacgaacatccaagaactcgcccaccgatttaaaaccacttagatactgagcctaccattttgcgttagtgaattgatcttttcaagtttactactcatagttcattaattcatacccttgaagcgtaaatttctgagaaagtctccgaaactttagtaatactcaacgacagtgctgacattatgaaaaaccgtagtaggtgtcttagatatagggaaaggataaattctacttttcctggatgttgacaaagtattctaagccattgattgttacccactgtaaagtacattgagaaagcaacgctaaatagatattgtgcaacagaaaaaattgtaataattgtattgcataactcattttatttaaattatgaatcactatcgtatatagcgtaattttgctttaaacgctatttcaaatctatggtaaaactagatgaactaacgttgctgcgaaagttcatagattgcttataaacctatttctttaactaaaaggatgtattttaactttattttactgagccaaagtccattcgttgacggtgttgaaattattctacagcttggtcattgacaaatttcattttctctgataattcatttaataatttgtatcaaaaaaaaatagattcttgagaaagattaacataaaagataaaattaccctacatttctgtactcaaatcgatatgttctaactttgaaagggtttcacaatatatgaataaccgtatattggtacaatttaatcctattataggtaaaaaacctcacatagagacaataaataattattattttttgttatattgtcgagaatagaagcatgtaatgaatgcaatatctcgttatttccaaagagtcaactgctaagtgagttccaacagaattaacaggcagaagcaagatactgatgtcttcaacgatcacaagataaaaggaaggtgtattttttacaaaaaatttcgctgtcagcttgctccacaaaatgcaatttgcactcttcatttttcacaactcttcaatgtcaaaaagtagtaacagcctaaaaatacgagctagtgtttttattattcaaggtagatcaaaaagagtataatttccggctatcttgaaaatgattcacgctagctaaaagtatgcgatgatgactaattaatgatgacctgcatcatttcgattctacacactttaaacatcattttctaatgcttctagcgtcgtcaagttaggacctggcctaataaaaacatctgaaaaatcttcgttgcttgtaagctctaaattatgttcattcgccaaatgtaaaacacaaataaaggcaaaactggtggatatatctttgagttcttttttctcgtatgtctcctctaattgattgacagtggaaaaaaaagatttgactggcatgttggtttcttctgactccatctccgaaccctcaatatgagagttgatggaattttctttaattgtgttttcaagatctagacatttccatagcttttctttcagtactcgcacatcaacctttttagcacgcttcgcataattcagcatatctggttttgccaaacgagcagttaacaaaaggttatcaccaaatcctgatgatgatggaggtgtaagcagaggtgtttgcttagggctatcggaatctccaaatccatacgggggtattccttcatcaacattatcactgccatcagaatcgaatccatggggttgaataccgtccaaatcattctcatcatctaaggctttattcagttgtagctgtccttctccatcagcgttgggtagaactgacatctttggtttcaagaaaagctgtaaaagcctcttagaatcatattggtagtcatcaggtagtaaacatcgattatgtcttttccaatgagacttgggaagcttgagactgctggttgcaggagtgaacagtgcttcgacgtctacttcctgcaagaaatcaatggcgttatcaagttctcgacgctttttccgttccgtggaagaaagagaacgcgatacattatctgaactttcagccgtattggaagagttgaatacagttgatgcgttattgatattttttctcaatgcctgaatgcgccaatgttcgggtccagcccagttctttttcattgacttgtcaaaatattcgtatactccattcgcagcggcagtagaaataatagaataattttcattcatagtacttccatcagccatattgacttcagtatccacaccaaaatctggattttcggattcgtccattgcttttggtactacatcaacatatgggttctcctcatcgtaagccatttcctccaaagcatgcacaatatgtccttcttcaccatcggaatcggaagaaagggaagctgcatcagcatcagttttctccatcgtattatccactaaggaggttgtcgttatcatgttaacttcatcacttaatgattttaagagagagacatcaagattccctttactatcaaattcaaagccctgtaaggagggacatattgtcaactgatcaatatcggtaaaatagcatttgtaaataccattcaaggtctccctagaaatattgtcatgcacattagtcatttctgtgtcatggctttcgataggcgctgcgactaccgcttcctgcgattcagcttcaacatctttattttccaaatccttgatgacagtatcgctagaatcgaatacaattcgtccatgttgatcaacacaaagatgattcattaataagcctttagcaccatcctcatcaaaatctgcacacattttcttgaataaaggatcaaaagaacattctaactcaaattttttagcgcgtattgactcgaaatctttaacgagagtctttaccgaacgttgtgcacgctttctctctttctttttctgtagatcctcatcatcattttcagcatcttcgccttcttccgtttgctgcaatactttggaatcgtttgccaatccactgagtagcttgccggtctcagtagcaacagaatcaatacgcgaagtataaattttcacgcatccgtctaatgtacagcttgccttttggaaatttatatcttcaccatcacgtagaagcgacatgtcgtgaaaatagtcaataagcgcaaaattccaggtatttgtggaattaattttgttgtcagtagctaatttaatccattcctcaaaattagaaagaacaggaacctgatgagagctattaaatggtgaagaattgtttagagattctcttcttggcgttattgagtgcagagctgaacttcttcgcaactcgcgctgcttacggctgttctctttagctctttttttttctaatgcatcgtcatttaaggagggtaagctaacgggcgcatgcccgcctaaactagctcttttcattgatttaagtaaatgtttatgttcacaagtggtaagtcggtgtgcctatacgtatatcgcgctttaacgatatgccgtatatttctttctaatcaacaaatgataaagattcaaataagtttctaaataaatgccaatatgataacattatttttcttttgaaatttgttttcaaataatatagtatttcccaatttacttcattgatggcttcccgattacaaagtcaaaagtcttttgtttattattctgttacaaattttgtgaagtttcaattattataaatcttccatataaaattaacaaggtaataccaaatcaagtttggatcctaaaattcagtagctatcaagttttaagagaattttatttttcgttttcgtttatttaaacttgaacttcgtagtattgtggagcaaatggatatatctaagacagtatatctcttaacattttacttctaaatcactcctgaatgcaatccactgaatggtatgcgcatttatcctgactctcaaaatattcaaccaatatcaaatgcagacgatgtaagacagaaaattgattctattctatattaaaaaataaaaagcattagtgtaccatcagatataatgcgtgctttttaaacgaactattataattgtacagctgcccatatattcatgtaccatcaattctccaagagcatcattgtctagtttaaatagccacgacatgttggagcaccacacaaacaaggaatcttatcagcttcttccggaaacttgtaatcataagtaagttcctctccatgcataatatccctgtcagcataaattacgatttttcttttcccttcaactctaataatcctagctatacaattaggagcgcatgaatgattgatgaaacgcgcgatatttcccttttttgtagcatcaacgataacatcctcgtcaatacggaacaaataactgtctccaataccttcacgaacgtagttcttttcacgattatcagccacccgttgtcgaatgatttctccaatatactctatgaccatatcatttttatcaatgttttccatggcaaaaagccctaatgtatgaatgcgactagggccaaaatgtaattgctttttacgagcctttagtgcattgaatctgagcaagtcagcttcggctggcaattgagacttttcaactccagcagccaatcttctattgttaacacgattcattcgtgatgtgatacggcttgtagaatgactaatagtatcgatggttgatcgattacgaagtggtagatatagtgatttttcggtagttggaataatatagtatccctcacttttagcagaaccgctagtattagagcgaaaataacctttaggttctggaagaatagccgtatctccatacttaacatccccattcttaaatttacatgacttgcgttcataagcccagaaattgggatcgttgatatccatgaggggttcatccttgagtgcctcttgaagatatgagtaatcttcgtcattttttaccaagtactgtagaccatccaagtcaagaagtacatcgtcttctggataattgtaaggaagtgcaccataataaacgcttccagtttcatcaaactcattaatacgccatttgggagctaaagctaaaacttcatcaatctctttcttaggcgatatgagttcatcttttatggcgctacctgattttggaatcgcagcactaggagaaagtattgatgcatctgattcggtttcgctggacgaagtatagtcaacttccatcttttcatattttttctttgatattttagattttgtacgaaaacgatggaatttgtcattttcatcagatgtatcagaaaaaactggagtcgcctcgtcagacttcacagactttattgagccaatcttccctctttctacacgctcgtctccagaagataacaaaagttcttgatcagactcggcttcagaagcgcttgagttatacatttgattaagctggtagtgtaaaggtcgagcttcgtgccttcttctacgtcttctttgaagtttcgacttcgttttactacccgctgaaagattcattttactggaatcaactcgttttttaaatttgggaagactggggagctttccgactgttgattcaatttttaaaggaacatcaggaacacttgtagatgaaaccaataaattttcttgtagttcttccttaacagaaggcttaggcattgaatgaagatatttgaagattgccggtccaattattttactttttacatcacgtaacaaagcagcctcaagatctctaagcacaactgaggttgcttcagcgtacgcttcctcgggaggtaaaacaactcttcgtactgcgctcttttttccatcttcctttgtacgtgaaggaatgtcatgaaatttcaattttatgcgacaattttgtacgtatgtacgatccagcgcacggtaacaattgctcgcttcgcgataattattaaaagttatataaaacccgtctttgttcatgtatatcttttcatacaaaaattttcgaaaatgatgctttatatcagtataatacacacgatctggagggacaaagcgatcgtcaattagtaaataaatataatcattaatattttttggaacatcagtctcgcttgacgtaagaaaacctgatttctggtccacgttctgaactttagaatgttgcaagtctccattgctcaatgtttgtgaatttttcgatggttgacgccaaggaggaatatcttcattcatagctgcagataacttttgccgcgaagattcatcttcccgctcgaatctctgtttctgtaaagtttcttcttgaaattgcttttcaacagcatttaaagctttcttgaacgcttcttcgcataatgaaccatcccgatcaaggactactgaaagaggcttaccggaaaacctcaagccatttgcttgttgtacagcaattttcgctgaatgtgctgctacagaaatggaactacgcttgtcaaaagatatacagcacaaccctaaagaagtacctgtataagggtttaactttaagtctaaatcgaaaacttccccaaatgatttaaaatgatatcggagctgttcagaagtcacgagcggtgagatgttagaaacaaaaacctgagttggaggttctggacctaatgaattctcattgtagtcataatttatagtttgcaaagattttaaaaatggccttccacttttaggaataccgcgggcatatattggatttttaagtctagggtcgcgaactactaaaggtggttttgaaacaccattaaaccgatatataattttgcgaccaaggttctccttgattcctaattctggatcgtataaaactttgtaattattcctttgaacgggttgagatttcgaccgcgtagaggtattaaaatccatggctgattaatattgaatccaagtagcaaatcccaggcattcgatcaaaacaaaaaagagctataaagtaaaaaaaaaaaaaaatcaagagatattaaaaacctgtgcactaaatcaaaatcaaaaatttggtaacaactcgataagtgtaatttattccaataatgagccttgacaaattatgaaaaaaaaaacgttatgtaaaaagaaataatatcgccgggatgaagagctttctattgtaaagtatttgaaccgtaattcagcttataattggaaaagtatgtcgcgcgacgttactttgtaaattataacaatattcaaaaactcaagtaaaacttgatcagtcttcaaataaatacgttcataaggctaataacaagtaaaaaagctctgtcaaacatccgtttggccaaacacaaagtttataggatctctgtggatgtttgtgtaaggtaggccaattcatattacgcgccacagtagctcttatagcgaaatttagtaaaatcgttatccaaagataccgttgcatattacactaccaatgttgctgaagagaagcaagaataaatggcttgagaaaggaaaacttgtagatgaatgttttagaacaaagacataattataaactacatgaggaatattaggaatcataatagaaaatactaacatgaaaagattgttggtacatgatagaaaaccgattcgcacacaacgatgaatgagacgagaaggtacaaaaggataatcgaatacagaaaaaccaaataagtgcccagatgcgaagtaggaaaacatttagcaaaacaagtttaacccggttgttttggataatgaagtctaaggctaaaaagagaacgtaaagcacaaacaaccaactcctagagaataaattaaaatagtagacgaccagcgttaccaacaatcgtagaagcggagaaaagtatcataggaatccataaacgaaactgaatttcagggaattcaactccatttaactcactaaatttgttagctgataaacgaatgtttgaaaatactggagcagcctttggtaggcagttgatggataacaactaacatacatttttgaggtatcaaccaaattataatataagatactccccaacacagaagtaattgtcgacaaaataataccgtttcttgagcgatcaaatatataccaaatgctagcagaactcgcaacgagtgcaacaatggagtgtgaattcgaaataaatagtaatttctagagataagttagcaagagtatattcacgatgcatagtaagcattggcaaagagggtttactatcaaacttaaattctcagaaaacagcacaacttatttatggtgatgaataaactatatcaagaagtcgttacgcatagataattgctgtaactccatacatcttgcatatatatttcacttttttatttaaaggaacgcctcgtataatgtaaaacttaccttcatagaaagtagcaatgtagcgaaagcagcaagataccgagaaatccattgccatttagacgattgtgaagggcgtaaaggggcagctcccaaaggatacttcgtatccatacgtcgataagagagtccaagtatgacagcaacgaagccaaaaattgcaggccatgggggctcaaatttccaacttttgagattgaccgtcagaagtggtagctttgcatcttgcacaatttgttcagccaaataagtaaacacaaaccctaatccaaatataacacaaagcttacaaaaaaaagttattaaagatgaatagtctataaatgttatccctttctttctctgtttctttaaatcatcatcgatctgtctagacgcgtaatcttcataactactcagggattcatcatcttctgcctgctcttcatctaatttaagtggagcaaaaagccctgatagtgtcgatttcatattgtccaaagaaagtaccgacaaggacttcttgaccgctcgatttccattataaccatctgggtagcgcggacggggttcgtaaatctcttttctgctcattttattcaagcttacggcacctttctgtagagatccttgtgaaactgactaaatggatggagaagaatcaatctttacgtttaggtacttggcagaatcgagacattgcacaaaacacgcatagcccagtgacaagtaacaattttgagtaacaaagatctcaagtaagagagatctgaaatgaataaatatttacaatcacttttatatgtgaatttgacctttctaaattatagaaatatactcaaaacttttctgcatccatattactcttattgttaaggtatattgtgctttgatcacttgaagatgcatgccataagtaatgacaatgttaactaataacgaaaatatccaaggaaaaaactctcgcaaacactcattctacgaaacaatcagccacgaagaaattgctttaaataattaaggaaatttcataattgagtctgtatgcctaaagtggtttctctagtttattcaaagtatagcaaattcatctactatttttaaaaccgcaaaacaaaaatattaattgaatagaatacaaaaagcaaaacaaagttatgctgactacatgatgccaacaactttcaccttccgtagagaatcatcataaagaaaaaacaatattatggttataaagtttgtctcatcacaagaaataaattcttcagtccaaaaaactatttaatagacttcaatatattaaaaaacaaagatcattctaaccatttggacacctaaggaattgcgctgaaaggtaaaaatgtcaccaaactatacttatcaagaaccatttatgacaataattttcttctaaattaagtgtgagatgtatcaattatgaaagaaagaaataaattgaaacttcttcagcttattcaccttaagaagaggtttataactgtttgcgtcgaggactatcaaaagcgtgatagctgatttgaatagaggaaagtaaacggcaagaaataaacaaagttggaaccaatacagccaatgccaaataacccatgtacaaaccaggagtaaaaaattgatattcggtaaacagtcccgtcgcaccattgtcggtgacagggtgcttccttgtttggtgcatagcaagcgtggtttgtgatccctcattttgatcaggtaaagaagccaattggccgtgttgaagagcactcttccctgagttgagaccacctagcgtttgaattacaaattcagcattggcctcttcttcgttagcatcaaccttaaatccttcaaaatctgagttattcaaaggagaagaggctataattacattccactgagcatcttgttccaaggtagattgtaagttgtagaacatttcatccaattccattaattgtgcacttctatgataactttcatttgacagttcattcatgtaaacaacagttatgcgatcattttgaagaggaggaaaagcattaaaggatccacccaagtaaactacctcaacgtcgcagttttgctttgccgaatgcaccaactcttgtgagtccaaagactccttggaataaggaagaagtaagctatagggtgattgcaaagaaacacgctttaaatgtttaaaagctcccaactgaaaatcattaacctcaaggcctggttgatgtataattaaggtagctgtattgcatgtcgaaagtgcctcaattgcggcgtcaaaaaacatcatagggcaagtggatattgaagaatcatcggatgatttggggagtttgctgtttttagttagattaaataatttacacagtataatgccatcgatggatgcaggacatacgagttcgtagaaaataagaaaatcggcgaagtatctttaaatgctgatactaaagaaaagcaaactataaataaaatactccaagaaaacattttgacactaaattttctttactttggacaagtttggatgttgtcaattgcttgagcgttggagtggtagagaatagctctatatactactttcagtatctaaaggtactaaaatccttctgaatgaacaagctacatataagcagatagattatgtaaatataacatgttatttacgagaaaaaaataatactacaaaacacaagacggtgtagattttgttccaaaatcatgacaatagtccatgacacttgttatacacaaaaacccttatttattactcagtccaaaatacccgtttataaaagacgtgcccttgtaaatcccttttgctttcagccactcaaagctttttcacataactaattaacatcgaaggaaagaaatgtatcagaaatttgaaacaggcaaagtcaaatggtgtttataaatacattgtcaaaactctttcttctagccttagtagaaaaatggtaattattttaaaatacttttttttttcaatttaggaaagcgaaagtcagtttcacttattccctttgccttctccagaagaaccccgtttttgagcacgcagttcacttttcttaagaggtcttgcatcttgaatgtgcacaatgtgtcttttatgagcagcaagattggtgtcactagtccaaattggcagagaggcactgtcagctgttttaatcgcaacattatcaattgcagaccaccctttcggaatgaaattagttagcagacacttcaatacagtcgtaatattctccaacaattgttcattggtttgagtggccaaaccacagagaatggtatgactagtgccggcagataacttaagataagtagaatgaagacaacgagcaacttgattacgcaaagtctctttcttttgtaaaacagaaataggaaatggcttaatttttttctgttcaaaaactttccccatcaatagggggatgtattttaatacacgatcatcaaccaaaaaaaggttgtgagagtctcgtagctcacatttttctcggattgttttatactttaatttcaatctcgggatgctaagtacttttgtaatgacttcgtcaagcccttgttgctccaccagatcttgatatgtctgctgtgaatctttcacaatcaaacaagcatctgttacatgcattatcctgtgcggaaggaatctgtaaaatagttagtaccttataattttaatgaagaacacgcatcgattctatgaatgttacaacaagcttgatttattagcaaatcaacaaaaccgtaatacctctttatttctgcacaagcagtagaagcttaaggttttaagtaattataagaacaaaaattttattgttgatcttattacttcaggaaacttaattcatcattaatgctcacttacacttttgatggtcttctaagcgactctttctcaacgggttggaatgtattaacctgaatataaaccttttctttttcaataggtttatcagaggatcgaatgtgctgcagcagggctctaattgttttctctagctattgattatttgtaagtaaattgcacgataatttgaaattaaaaaaaaaatttcttactaattttatgtcaattttatccaatgactttaaatttttctttttttcacttgtaatcgccatttctattaagatgtaagtaatggatggctttttgcaagttcaacttgggttggtcagagaagttaatattacaatgctattgaaagttctgtagcatatcattatcaaagtttagtttgtaaagaattaatcaaagaacaattgttctgtcttatatgccatggccttattaaattgatggctttgaaacgatactagataaataaggccaacaactcaagaaccgcaaatgtcgaatgaatggaaaacttattatctattacttgtttaacaattttcttttagtggttattgtaaatttgaatcatcgcttttcgcaaaactccgcatattgaaaaccctcatctattcgactgtaaaaacggaattcaatagatatgaaatttctatacaaccgcacatataaaaggaaaccttgtaacataatttttacattcatacctacactatgaatgcagtatacagattactttttgactaaagtaaaagaaataacacacacgaaagaagcaagagaaaacaaacattcataaagaatatcatatcatttctgttattcataaaagattatgctacaaattgctcacccttcgtaatgctctttttcagctcacccaaagctaccttaagaaggctctcctcataatcattgattttaccaacagggtgaatggtgtcaaccccatccttacccaaagttacacgagaggcaaagaaatcaattccttgatccttgtacagaggggactccacaaaggtgcattcctcaacgccagactcaccagccaaagcacggagtacggaggaggccatacgagcaccggcataggccatagacaaggtcgcacttccagcaccagccttcgcctttacaacctcatcaccaccaaattggatacggtgaataagtgcgtcacgcttttcaccagtcaattcaacaccgccttgggacaacaaaggtacgatggtcgcaccggaatgaccgccaacaacaggaatatgaagaagttctgccttgccattagtgacttgagaggtgaaacggctggcacgaacagagtcaagtgtggtgacaccaaacaaatgtttgggttgatgaacgccaacacgttctaaagcctttttaaagatgggcacagtagagtttacggggttagtgacaacgagatatttggcttcgggacaagtttcacctgctgcaaaagcaaggtcccgcacaatcgatgcgttagtagcaaagagatcatcacgagtcattccgggcttacggggaacaccagcaggaataatgaccacatcagcaccgttcaaggctttttcaagtcccttgtcatcaggagcatagccaacaacattggaagtggtattgatatgtccaatatcggcagcaacgccaggagctcccctaatatcgaacaaggccaattcactaaccttatcgttcagttttaaaagcattgacaaaggctggccaatacctcctccagcacccaaaacggctactttgaatgcgcgactggaggtcgtagaaaaagaacggggagcgatactcttaaggggagtaaagtttttgaaagctactttggcaaacatctttgaaaggtacaaattcgcaaagcaaagtagagaacacgggtatttaaaaaaaatagagagagtgtgtgtgagacagagaggggggtaaaagaaatttcaatagaaaatgtccagttgaaaggttgattcttcttttcttcagaagatactagacactatatcaaaagttagaaaaatttgttgaaaataaaatatgtatatatatgcaaacatgagtagccgcatcctacaccataacgtttatacggactgactagcaaagcaaagctactcgacatcctggttacaaacaaactcctcatgccgattctaagcataaaaaagcatatgcgtatagcatctcttataaaatattccttcagaaagtcctgtacctagtgacctcggagaaacgggtacggtacataaagactggcgtagctgtttatgtcaagacttttttccaaaaaaaatatcgactttcgtgtgtataaaaaggtctcaagagtagtatttacgtcggtttattcatttttaaaatattttttctggcaaattgggatgtaacttgatcgttttgcatactcacttttacttaccttaaacttaacaagttcgaggtacgcttttggaagtcgttttagatacttttaggcaaggtcccgagctttgttgattatacgttgactatttggaagatatgttgaagttgagaatcacacagtgagttggtacagtatatatacgaattgtggggtagtgcttacactcaatataaggttgtagcattacgcaatcgatctcaacgggcattaaagatcgaacgccgatttgtcaagaacgacgactggctaaaatagcaaaccgcaggacagtgcaaagcaatgcggaataaattcctaaaactcgtatagtggcttcttgctacactactgtaaatatttggcagaaagaaaagctactgtactatttcaactctacaatggaaacagattatacaggcagctgtacaatgtaagaatgaaagtgacagttgtaaagttatagttcaagcctcaaagaaaaaatattttgtatattatatatatgtatatatgtatatatttatagatgaactcattcaactataaaacttccaaaatcttcctttcctcttttattgaacagcatggctttttttcataaaaacataacatgagcaaaacagcaatcgagaaaatgataccttagctagaggatttgtttagactgaaaaacaaaaacaaaaagaagatgatgatgaattcaattggcgaacggaagacacttaaaatcctttcgagttaaaatcaacagggaaaaagaaatgaggaagcgtcatatacaacagccttatcattgtcatccataaattctatttgcacacaaacaatcactaaatttaagcttctatatcgtttaactcgtaaaataaccactattcgtatgtatgcatgcacgcatatatcataaagtcaacgtagcaattcgtggtacggacaacaacttttcccgcgcattatccgatcccattcaatataaagatgtatgtggggaagtacacattgagtccaagggatatttgggcaaaaggtaaatcgcatcggaaagtcgaaagcgaagggaaaacaaatatttgtatctctgaaataagccgaagatttgattgatcaattttacaaaacatcgagcaaagtgtgtcgttagtagcagtaaaagaaaaagatgaagatgaataaaaagctctagacaaatcaacttaaatctttactatgaaaccgttaggaatatagcttgaaaaagctctctgagaaaaacttattcgtgacgtacaatctcagagacaagctctcccttttcattcaccttgtgcttgatctgctcgggaacagcacgttcagcataatctccctcttcgttggggacgttgatgttcaagcttgttgatttactagtgacaacttcggacgacaacgaagatttgctcaaatagatggaacctccatcgcattggtcgataacaatcattggaacgtgattcataacttggcagccaaaattggaacacttagcaatatcaaaagcggccactaaagtatctactacaacgctagtacgtttacagttgctcatggaaacggtgtttaactttcctttaattataattgtgcaattggagcaaccgaaaatttgcactgagtggttgagctccacagaatccaagactatactgtgattgtcgacttggttttcaacaaaccacttagtattttccaactcaatgcgaggtggtttaacgggagcagtttccgctggcttagaaggagcagagcttttgattttaggcttaggaccaggagtgggtcccgttttacgtaaattcggatttttgtgggtcatttcactcttatccaccttacgaagtccggatgtaattccctcgcctttattaatttcggcaaacaccgctcccatatcacctttattatcagcaggtgcgggctcgttgctatccttccaaaaatcattagatggaggaggtggtggtggtggtggaggcaagccgccgtttgcagaatcgccagaagatggtgcctgagttttcgaagcagacaagtttgccaaagccgttttcaagggtactgcatcctgtttagtagaccaggtgagaccggttttgaagtgggtcttgacgtatgtaatcaattcagtcaacagagtaaggtaagaacgaacccattcgatttgcaagtcatctttacctttaaactctttcattacacggttggcgtagaattgggacgaatctttcatttcagacataaaggataatggagtgggctcaactgtgacccagcccaaaatactaattccactcatgacggtagaaagttgattgaactcgggggcggtgcggtgttcatctcgaatattggtaatagtgagcagttcagattggataggcttgaggaattccaagagttccggggaatccatgtcgggtttctgggctttcaaagcgacgctcaaaacctgacgtaaaaggttaaaagccttctcgacgtgttcactttgttcggcaatcaaaccaccaatttttttactcaattccatgtatttagataaatacttggaacaaaattcatcgtaggcggaaatggaagcaggaaccgcttcaacggcagaggtggatgtaagacttctgttccgaggactgatagcagccgcaacttgatcatgtaatgatgcgacagcaggactaccagtcgacacggttggggccgttggagtaccaatgttgaaggatatgttgtgggtttgactgtttgaatctctagaaggacgatgcatgttgggaagaggcttatgaccactttccacaagatcctccaaacgagaagttgccgcttccagtctatatgagtaaatgttagatgcataatcaattaaagactattactcttttagcagtttaatgcaattacataccgtttgagaatcgtggtaaaattgtagcctgtttcacgtatattgatcatatccgacatggttagacgaaaagaaaatgtgtttagcggaggttaagtgatttttataatgcaacgcaacaaatatagtaagtgtggtggtggatggaggacgaaggaacatagagccggcttaagcaatatgaaactcggtatcgaaaaaagcgacttaaccttttcagctgtagtataaactagcgtttttattatataaaaaattgaaaaaacgataactatttccctcttttgaagctagaagagctactggcaatgatcgtgtcttggctgtgaacaaacataaatacttaacataaaaaaataattccatattcgcgctgcaccttactttagccaaaaaaaatgtaattattaaatgcaccgaacctctgctgagatgagtccagagattatcgaggtaaggtttttaatctggcagcttcgtctgttgtgcaatcgaaactatatacgctttctgagttaaaagattggaaaagagaagcagcgatgccgttgctgagcttttaatttttgacgtgctgtttacagtcgctaaacttttgacgaagttcaatccttttcctacatatccctatgcttactctaagtatagtctcattgttgaaatgttaatgcctcaattttttaaaaagaatttgtttacgatgaaagtgaaggaatgcagttatttaaacgactataataacattgcctgtacagtattggcaaataagacctagcaaaacaacgttgaaaattatgttgatttataatttaggagtaaattgattttactaagtcattttacattaatcatacttttatttattaatttaaatggctgctggcaaataaggcggtacacacgcatttgtaattttgctgtactgcgttaatgtcttgaaccctataacgtttaaggaaagctaagttggggtgaataaaaagggcagtgacaaaataaatgtgtcagaagcaattgcattttgaaaatgagttttggaattctacttttcacttgctattattgaaaaaacagtttgctttgaaacgagtattgctcatttatttatgttgagcggcgggaactgaactccagagtgaatattcttgatttcgctgtttcgtttgtcgcaatcacagcaattaattcgcgcatgtgttttattaaataaagaattatcttgatgaaatgaagaataattacacttccttgaaaagtcctctagatgaagaagatgaattgaagacagatcatgaaatcgatttggaaaaaggcctgcttccagaatataattcagaggaagagggcgcattacctccatattcaggtaagaattgtaaataataagaaaggaattactcaattgaaagttgaaacttgccattgctgtaaaataacttggatgtgatcattgtttatagtcggccatgcatgcacacactttgatacatgcactttctttactaaagtatttcaatcatattaatttaaacagattacgcacgtgtaagcaatcctcctaacatacatagagaaaaccattcttccgggacgacagatgattcttccccttttttgattaaactactaatatcattcactccaatcgttctactcaatgctctagcagtttgttatctaaagtataaagacgctttctttaaaaattatggtgcagcggaatggacgttatttggattttggtgtcttgtttgcactttggctttaatattcttgacttgtaagtgagacaatggggttaatcttaccttcagtcactaactcattagacttctatgaaaagggccaaggcagttaaagtaactgtaaatttcttggcacaatgtgtaaaggtaactgcggtcggcttgtacaactcaagggaaaaatgggtagtaataatttggctattatgggtagtcatttgctatacactttttcttcgcgccaaattcggtaacctgaacttatacaaggctctcatctgttctacatgcagtatttcagctgctttacttttatttttactatatggtatgtgaagttatggagttaccattactgaccgctaacacgcagttcgtcttccattttggacactcaagcatatgctttttggtttgtttcaaatgctgggtgtacaaagttgtgtcgttattgtacagaaaggtttgatgcattcatttgataaacatatcgacgggacaggctacgaaattgaagccacttcactctttgttataggcaattttcttttcttttacgaaatgggtttgttcaatattcctgtaatttattctaaccgtatcagaatgtccaggtgctctcaaaaggatgcccaaatttatcaggaatggtatagcttctttcctaggtatgtgtattcaaccaactgtatgaatgattttttacttacccgactaggaggtatagcaaatgcgattggaggtgccaacgataataatgacattcccttggaagaaacggaggccgaaagcgaagtctaattgctttattaatgtagttgtcgctacagttggaaaacctctttaccaaaatcaccaatgcagagaagctgcggcgttttttaaaaaattagcaccaactttctttaatcatcctctttcactataagtttatggaatatatgcttaactcattcttccaattactataaattgtcaaaccaatgcatcgcttgaaatgattcgcgatgttggttaacatacattatgaaagcgatttatgaagtttacaataatggttttattattcaaaaaaaagagtttgcttactggttgttacatttaactattgcaataaaaaaactcgccgtgctctttcatattgcatttatgatttggatcaaatatttgagcaaactgattttagatcatattatcagcttttcctgatgtttcctattcttgttaatgatccactttttttgcctggggatattaataaattagttagcgttaggattcaatttaggtggatgaatgcgaatgtttacatctggaaggttattaagataagaaacaaaatgcacaaggttgtaacatacagtggttggttgtttaaagcctttatatcttatcgacaacattggccgattattgcagaagggtgttacaattgaaactcttgcatgttctttcctttttttttttacgtgcaatctttccaaattgcagtttcaattgtagataatgaaaatttgtttgtaaaaaagctccagtggattttataaatttactgaagcaaggaacttcttttttcccctactagttgaaatatatcctctgaaaggcaaaattttacagcgtccgttaaaccaaatacttaaccatagttgatgtattaattgatttccaactcattttttgtttctacctttttcaatactggatgtcttctatatgggtaatttgaaattcctgctattcgaaaacaactatgttgctcacacattatcctttcaaaaattaataaataataaatatttaatatataaatatagttccaagtcttttactatcctaatctatgaagaaagaaattgtagttagtttaattgcggcgccagcctcacttccaaacattcatgaagagagtgtagctgaatatctagggggcaggtagttagtatgccatattcacatacatcctcaagaattttaacaccacatcacaattgtcccgccttttgttttgatgagcagctgaatgaatggatttgaatcgatgcacttgtatcgcgactattcacttacacttgttaattggagtgagttgcgatgatcaaagctctttgtccataatgcccaactaactagtgagactgaataataataatattgagatactttatcatgttttcatgatgtttcttttctacatttgctatattcagttcaatccggccacctttgaacatattgccagccatctgaattgttttgttgacattaggctggttgccctccgagtttgtttatttacacggtgacgcaggctggttgcgatgaacattctcaacgctgattggctgcttctccagcttgccactgtaaacaaatgatgtcaggatcgtctaacgaacgaggctaaactcgtatatataaacatcgatctgcttccccattgcggtttgctataaaatctggtctttgcattttggctgttttccacttgaaaacatcttttgtttacatcgtttgtcttccttctcttaagttactttgtaaaacgtcgtcccagtgtttgggtgcttcagtttgacaaagctccttgaagtagttgagtttattatcattgttcatctttcctcctttttaatcgatccaaaaagacttcatcgtctctacatttttattccatatattcttatcgtccttacattttctattcatctgatatccctttcgttccattatttccccctattttcaattgcattttccgttctcaaaattatcgtctccaaaaattactttacgtactctcacattttaattttataaaaaaaatgtttgcatttgcctcttttgcgatttcggccatctttttcctttgctcgttctcctatgtctcgtccatcaagctttgtggcataccaggtgctcctgcttgtaaaaggcgtgagatttctttatataagcgtgcaactgacacatttcctgacttgagttctgctatagcttctacctcctattataatatttcggaaggtacatattgccatgtaagtggctccaacctttgtgtttcacccgatgtaattgccatttgcgctaatcatagcactgttctcttgaactgccctactgtgcttggttatcccaagggtcgtggttccgcatgtgttgaaaccaattcttcctacggactaactcgcggtctttgtcagatcggatcctccaactactccactagcgctaattcttccaactttgacaatgcaaatgttatcaacgtgaccacttccgttagttcgggaagtacgagcactcacagcaagcgttcttccggtatatctttaagctataccaacattgttgatcaacccatcttattcactcgtgattcctcaatggattggtcttgcaacatgactttgtgtaatacggattacccttacttggttaacacttgcttcaatggcacccaataccccgttaattgtaactctgctttgcgcactccatttggtggtgctacttgccgtaatattggctataaaggtcaaggtatttgtgtatataccaacgacagtcgtatccctgttgccgatgaccatgttattgttaacactacttccaaaataaatccaaacattaccagtgtctttaactaccgtgacaatgccttcttgtggtaaaggatttcgcatagattccctttttctttaaaaaaaatctaaaataaggaacatgggcacttgttccttacttgcatgtcttccttgctaacattaaattatcacttacctccttcctttttcatgcattccttgtccgtttaccctcaacttcaccaaagtgataggcgtccagtaagatttttatcttttggcttttgcctctactcttttctcaacatgtctttatttgcactcttatatttgcgtgaggtatttacagatttgtatctttttttttttttttgcatgcattttttgaacgagcaaattaagtgggacatactggtatgttccaccattaaagcgcatatatttttgcaccaaaataacttactaaactacattgcgtattttcctgtgatcatggcactttaccttgatatgtttgatcttcaaacaatcaatcataagcttgactgttcatttctattttgattccttttaattcttcatccctttctttgttaaattaatttccttttgtttggcacaggttgtttaaacttagattaagatatatctctagtaaatactttactcatgaatttatccaaatacttctttacattctttatcattttatgcaaggaattttctgtaagtgttgtgcttataaatttttttctgctgtaaaatcgtatattcttcaaacttaaaggtgagattagcatgtttacactcgtaaaaatccgtcatccggatctggttttttgttatgacactttgatggatgactcccagagtttcatggtatcaaacaactctttgaccttttgataaattgctttagtgcactgctcgtgaactgaagccgcatttttaattgcagaattttgtatgttcgtaggacagtcaggagaatatatggatttcagtaatttcgtaaaaggcaacatacactctggaatgtatattgaaagaaactgaaaaagagattctttcgtgccttgatacttagaccatgacataatagttgtttttgttactatagaacgatctttcaattcgacagatgattcaaagtctgattgagcttgaaagagatgtaaaacgtaagaaaaagttttcgaataataatttaaagagttatcagtaaataatatccgtaaagcacctattacttggcattggaattgtaaatcagggtacacatcctcaaattcactaacgctcgcagaatccaatgtaaaagttatactcttagataaagacctgctcaacccatttttttctttttccataaaaatgaattttttcaatcgagaaataaaattatatctgtcatcagagttcaagtcctcagccaactcattacggtcagatttatcaagccttcttgattttaacagagaaatgacattatcagagaattcataattttgaaaaagaaaagtggaatgaaaaaaatttaaaagatcaaacacctgaaaatcgttttttaaaactttatatgtcgaacgtaagaaactgagaataaaagattgtattggctcagcaatacagcagcaaacattcaagttaagcggacagacgttgcgcacatcatctgtaaatttaagttgtaataaattatcgttgaaatctggagtcatgttcattttagcaagcagcgtttcaaattcttcactgtcattattgacggaagtttgttccaaattaccaaaagaaagcgaagaaaagttgcagcgctcctctattacacaagcttgatttatgtcgttgaaagaatatgcgaaccgaatgttcaaagggttaataaattctttgttgtttttattaaatatttctttttgttcccttattaatgacaaaaattgaatacactgttcaatgcttacacaaagttcagaaggaaaaaaacggggaagtgataagaacaatgaagaatcaatgtgaccatacgcacaagaaacttttaaagcaagctcaagccttttgaagtagggatttgagcaatatatcaagcactgtagggcaatggggtaagatatggtattctgacatgaacgcgcataatcaaaaagaaaatctaacaaggaatctccttttaggttttgagccgattttattaagaagtgtgaaattaactcaaagaatgaagaaaaagaattaacaaagttacttaaaccaatcagaccgaatctacggaactcataaagacgaagccaacgctgaaactcctttcgatactgcaagacaccattcacaatgaaatttgataaataaaaagaaatgttggtcttgtataaagagaattcatttaaagctttttttattaaacccccaattgcagaaaatttctggacgatactagcaaaacattcatcggacattcctgaaacggagatggtcggatcgagttcaaatgtgcttgaggttttgttccatggaaacactgtgctttcaaatccttgtggtaaaccagccacgcaattgaaaatagttgctaaagggtaaacttgcagtgcagaaaataatggtttcggactccaatcctgattatgaagaaaataatcatatacccgagaaggcgcttcagatatgaatggagatctagcttctaaatttttaaaattttctccatcccagctagggcatgttagcagaactttgttttcgacagataaatcgctgggtgatgaatctgtaagataagagggggacactgaggatttagctctttttctttctgaagtaatttccttagatgcgcttatgagtttggaattggatgatgtctcacacccaggcacagcgggtgttagttgttgatttgaaatatcgagaatgacatcttttcccaacagatcatcgtttacttgaaatgaaaagttttgaaagtattccgaggagtcaaataacttcctcttcaatccttcttttccctcaaatttcgaaagctgctcgacaaaatcagaatcaaatgaatttggcgtaaggtcgaaaacgtggttgccgaaccataacaagtcgtttttcataattccatccattccatttttatttcaaaatcatctattttagtggtacatttcaagatccaactcctttactggaaaacactcttgttatgaattactaaaatttggcaatatgtgtgtagttaatgtataatgttgttaacgtagcgaattaagatgacttcttatctagaacagtcaggattagaagatgtgaatgaagtatgcgtctcttaaactaagaaatggaacgttagtaattgatcctaacattgaaaccaattcaaaaatccgtactctcgtggccgtacaacagaaaatactgacatggagttaaaggtatccaggatgaataaaacagaatgataaattgaacaaaaactatcagttgttaaggaattactattgcacaattgcataatctatccaaaacgacattccagcatttaattttaagagagtgctatgtggataaaacgtatcctttatggaactataagagctcttttatgcttctctggttagtacatttagatttttttaaaaaaaagtttattgtactattcgtgatattatggttacagtatacctcgctggcttgatcgtttattgtccagagagctcgcatgcgagtcaaagctgaatgaatggtatcttcatataaaaaaagtctatttggagaattttggatccttcaacaaatttatttgaagtacttaatgttctttcttaatttttctcataaaaccatgtgtcaagcaatgaaggatttaaatattgttggcaaaagaaatgttgcaatcactaattcaagtttgtttagaagcttgcattatatagttatcgacttttcttttgcctttggaaagggatatcttcattattcttaatgaaacagtataaaattcttttaaacactagactagataagttgttttaattctttctcaaaaaacataaacgacagtctaactctaaaataatcgggatttttgtgacaccaatggtataaaaatgattaattaaaaatttttgcggataacacaagactttgtactttgtattactggaaaatttagctaattaaaaaggagaacacataagcaatgtattctggaggtcaaaatcaattgattttaacctccaaatatcagcttgatgtaccttttttgccatgacgataatacatacaggactttataaaaatcagcttggattaaatgacaacctacttatctagaaatagaatttaaaataaacattcagtacccccaaatcctttttataaattaagactaactatcactatcagattccaagtttatacttggcaaagagatattgtcttcctcctcatcatcttctccgtttccttccacattaatagaagtcgttttctcatctacgacatccgttgttttttcaaaagtttcgacgactgaagaagttgtgtttccattttcatcaccatttatgttttcaatttggcttgaaactacactagtaggtcggtcaacaaagtcaacgtctatagcagtaaatttggtttcagtgtcctgagaattgtttaatgcaacatttgtagtctcctcaacctcaacatctccatgcaacagtgaaacagttgtttccttgttttccgaaacaatgttaatgtgatcagtcccgtgattaatagttgaaggttgagaagagttgatttcactaccttcttcatttctgtcaccctcattagaaagaacattagacatagtcagctctgattcgcttcttttgttctcggaggtagctgtagaattattctgtaagcctgtatctgtagatgcaaaagactctttgatcccttcaatttcagtggaatctgtaatcgactctgtttcaaagggaggatttgatggagccaaaatactactttctttatactctgattgagaatccacctggggtggagaaatatgcgattggttttcaagagaaacaggctcaaatcttgactcaaacgtattttcaaattcgcttggtgaaagatgtttttgcaaaggtgggaacctaggatgaatcagcgattctattgtttgcatcgatgaccttgcgtgtgaagcgaccagaggatctggatgtacaagccctaatggaccagaaattatacgtattgcatgaggtactatcactgcttgtgaatctcccggtgataaaattgacgcaaggagtaaattatgcatagatatcaaaactgttgaggtagggttagacaaagatatctgcaaggtgcaaagatctattttggtccgtaataaacgtggtaatgctattgaatgagtcaaaatggatgctaaaaaagaaaaacaacaatccatgacatctgaatcataaagctgatgagactcttccgaactcataagtgtatctcctgcttgactttcagaaagtgtttttcgctttttttgagaatgcccacgatttttagagaactctatggatttggatgctaaacctttagaggaattagcaagatattctaataccagcgttacaatattttcgtattttgaaagagggacattcatatgtgtcacatccaaaaactttgaaagtaactttaaagaagagcataaaaccccagtatgtgttgactcagaaagtaaacaatcatttaatgaatccaggtaagaatcaaatgaaagaatgatagctggaggaattaccacaaaaagctttaaggttaactcattaactagcgtatgcaaatgaggaaggaccatgaatagcaaagcttgaactgaactttctacgcttttaacaggcaatgaaagttgtacagtataaacacgttgaattaaatccttcaaagcatttatgggaagcaaaacgattttatccgtctttgtacttaaaaaagaaattaaaatcaagtttagagttctgcatctgtgtaaagctttctgataagtttcttcgtagtggcctttgagttttggaaacatcaaattctcttcacgagttgggtatgtttgcggttctataacaaattgaaacaaaaaatccaaagtaagatgatattcctttaggattgaaataatactttgcttccaatagtcttcaaaatttcctttccccacacatcgatacaacgaagcataaagaacagctgctttcttctgtaatgaagaagggactacttcttccccatctaaaattttaatgcaaatattccttattgaggaaacaaatggacgaaaggtaggtgaatgcgagatgatcccttgatacaaacaagaacaaacagtacaaagacacttcccagattcggcgattcgtaagcaattattcacaaatgtgggtaaattaggagtcaccaattctcttgtaactgctggtcttcctacagtagagctaaacatttttgatacggttatcatggcaatctccaatgttttaggagtttctggtcggtttaacaaagcaattaaaagttttgcccaagtagctccatgctctactaagcaatcccaactttgagaaatagtgcagtgaatgagaataatagctgaccagcgaatacgaaagtcttttgattgtaacatttttgttaaactcgtgcaccaattcttgcgaacggaaagagcattttcactcgttcctaatctttcgatacatttttgatgtaccagtatgtccgctatttgaggcacctgaaatggtaagtcttcttcattcgcaaaagttattgccaaccaagatttcacaagaggaagagagccacgttctaataaatcactcatctaagatttctttattcaacggagtaacaaaaaaacaatatttccgttttcttaaagaaattacttgctaaatctcgagcttgtggtgtaggttctgaactactcgtgcgttaaggaaagtcttgctagggagaaaaggttaaaaatttttgagaagtaaaatccttttaaacttgagaatgtttaactcaatattagtattttataatgaccaaggaatgtaaattacctcaaagcttaagtctacaaaaaaattcagatagcaaagtgattttatgaacttcttgaaatgtgctgtaaagaattcattttttattgaacgaataattataaagaaacaagacttaatcgtagatgtatttaagttatatttagctaagttgggagaacgtaaatgatagaacctagaaaagtaaagcatttgaagagtaaaaacatatcagaagatagcaccattaaactaagctctaatgttgaacttctattaaatgtatctatgtataaaaaaaaagagagactattggtatattgaataatgggccttgaagatactagagcgaattcctaagaaatatttcttcttaactgtttctctcaactgcacacttaaatacagggaaagtatcgcttttcttatcagttaaagcttcttttgacggaccgaagcccaaaattgctcacgctcctgtaacacatcattgagccaacctttaacaagaggatgttgaattaatttaccggcccaagtgaactgtgacaaatctttctcaccattaaatttcctttcgtactcaaacatttgagcaatcatttcaaatttatcaatgtccttgacaaacttagcttcgggagtggaagcagactcatactctaaaaatagctctttaatctcctcagcttgtaaggaaaggtttaaggggatcagttgctgggtgatagaaaccatcgcttccgactccatacgatgcttttcctctttcgaaacattctcgtgaggtgttatatcaccaacaattgactcagccatatcatgcactacggcaatctttagacaacgttccttgttgatgcttgggtcattacataacatagtcaaaatccccattctatacatatggtcggcaatggattccggcttttcgatgccatgatatagccagccagtacgtggagtagtcttaagccttgacaaacaatctaagaatggaacaatagataaagatttggctgcattcattttgaaaggggagttaaatttttttctgaaaaaaacaaaacagagtataaaacggataaatccaaattaaatattataaaaacacaaaaataaaaagaaatccaaaaagtttttaacagcagatttatacaaatcagccacttaggccaacgcaggtggtatttgctcagggtaagtgaagaaagcaaagaaggaaattattttcgatttagaaatcatagaaaaaagaaatcattatgtggggaatttcgtgttattttaatttaatgatcaaaaaaaatgatgaactatgcatggcctaaatagtctctcagaaaaacgataatttagggttgatagtcatataccagcgacgtcgtctaaatgtttaaagaataaaaaaaattaataaaattagtgctttggggggtgaccacgaactgcttcacgtaagcaatcgtcttgaaaagtcagtttctcgataacaactattccagctttcttgagtaaatccacaccttcacattttacgaatatatcaggctccagagatcccaaaactaccgtagaaaacttttgcttaacaataagatctgtacaagacactttttttgataaccgcttgctgcaaggttccattgtactgtacattatagcgccctctaaagaatcagtaggatttttaagcataaatttttctatagcacattcctctgcatgtgtgtttcctggtcgttcacgagaatagcccgttgacacgatttttccattctgtacaataacagcgccaacgcaaaatgctgaatcagtaggctcacatttctttgcttcgttgagggcctttagcatatattcttcatggttgtaaggtttcattataaataaggacatattcgcaggtggaagatttgttgaggaagctaccgaagttttgtttatctcctccatcttaataagatcaacctcaaagtaaggtcgtactctttctaaaaaatcaacaagggtttcctgatcacgtagttcttgagcaaacaaacattgcatcccaggatatctttctgctaaagatgctaaacaggaaactagatgggcattaagatgaggattataaatgcaatcaaagaaaagcacataatccaaaaagtcaaatgtccagtcctttggatagggtgtagatttccaatccaactcatggacttcaacatcagaagcgttgttttgatctaaattctctcgtatctttttcaggtacaattgtttatctgaagcgacatagtttcccacaaaaggacttaaaagaataccagctaatccgctaatcccagaacccaactcgagaattgaagttttaggcgttaaactattcataaaccaagattgttgcaataaccaaggaacaacttttactgacgttttccacaagacagaaccagtagaacctcggctttggtgtaatgattgaagactttgttttaccttgatgggcttgttgcctattgttaaagcaatttgttcttgcttcgaatcaagcattcctaaatctgcatccttttgtttcgacaatgcaaataaaatctgagtctcttcttccacattatcgacagaacttaaatatttttctggaatttgcatgctgttatatacaattcttattagaagaaactataaaattagatgagatgggtaaaatttggaggagagattgacacgatactaaagatgttacgaaaaatcgaatgattatgaattgcaagactggagcttttataaagcaattcactaacagatactaaaattttcaaatattaagaatcaatttgcagggtgagaatgcaaaacttgtttcactgcgttaatgtttgtaataatcaaggcatgctaggcatgtaacactttgcacactacccaccatttaactggtatagcgaaacctagatattttatcaactatgagccttgcaaataggttgtctcatttaaatataaccggaggcaatgattttaaagcttcaatcggcccttctgttggaagacagaacgaagctacaagtatgtgaagtttagccttattgtcttaaagtaaagagcattaacatttatatttataagacccctggtcttctacatcacattcattagagaactcagctgctacggttgttaatgaattgcagaccacgaaagagcagaaaactcctgaacaatccactactgcaaatccgctcttccccggaaatgatttttctgatttcaataatcacaaaagtaagctattaggagttattactggaaaatctactcctagttctcaggctgaaaaatctgataccacaaactcaaaaactggatccacagaagagttgactgagacgccagctgatgaaaatgcaaaacagtacatgttggaatccctgttacccataattcgtatggaggatagtgaaatgtcgacgttgcagttaggatgtgatttggctgccttgggtttcgacttggctcctgtagagtatgtttttctaaggcgttgttgaaacttgaatttctaatttgattgtggttactaaccttttttagggaggaccggcttatttcgacaaatctcttttcaccatgggctgaactcaatacaaaaaaaccagtctcccagcccatgttcaaattacctgcatgttacaaaaacgttaatccacctccagccatttctaaaatttttcaattttctgatgaaactttattttatatattttacacaatgcctcgagacgttatgcaagaagctgctgctcaagaattgtatgtgttttccaactttactttttaattgttttttatattccatctaacgtaaacagaacaaacagaaattggcgatttcacaaggaacttcgtgtttggttaacaccggtccctggaatgaaaccgttgcaacgcactcctcagtttgagcgtggttattacatgttctttgatccgattcattggaaaaggattaaaaaggactttttattaatgtatgctgcgctcgaagatcgtgctcagagtgctgtgcacagttagtcacacgagtttttgtatgggcatacccctagtatcaaggagtgcgtgttgttgattaatttgtatctttttctttggcaaaaaaataggaaatttatgggtttggtaatcttgatgaacgatgaacttttaagtgtctgtttcacaaattggtacataagaatagatactgtggtcaataggaaacataaaatgatgcatatttaattttgatataatttgatttaaatgtcttaaaaatagtttaaaacttaaattgatcttatgatgagcataaatgagatgggacatgaagtagtgatcctatctagaccgatgtaaaattctattataaaaaaagctaaattactagatgcaaagagaataacccaagcagaatgtagcatcagttggtacaaaatgatgaacggttcatgaagcttcgtaaaagtgccaactggtataagtgaccaaaactagattttttgttctatctatgaagaggattcatccttttttggattctgatcttcatcaggatgcagacgacgaaaggcacgcttaaaaaacccgccgaccgaaccgtcttgtttgttttcttctcctgtagttggctcggtagatattcctgtagagtgtttggaagaagtagaagatgtcgacgtagaagagtttgttcctgaagggctactttgtgtccgtcgagctgtgctatcatttaatgcgtctgctagttgttcaaggagacttctttcatgcggagatagaattttcggaatagtgacttcaaaattaacataaaagtttccgtagcgagatgtgttaaccttgcgaataccttttccggccatagtgattcggtctccagtcgaagtgcctggagaaacccgaagatccacgtttcctgtaagtgtaggaacccgaagagtgccacctagcgcagcagtagtcatgggaatttttgcattataagtaacattggtaccctctctaacaaagaacggatgcttgcgaacatgaatagttgcaaacaaatcgccgggccttgatttcgcatttgggcctcccttagcagtagacgcatcatttcctgcacccattacacgaagaactgtattgtcgtcaattcctggaggaatgtcaattgagacagtttttcgctctcgaactgtaccagatcccatacaagagcgacaagcagagttgggaggaatggttgttccagttccaccacaagagtcacaggtagtttgcatgtgaaaagatgggggaatgaaatgaagacgttgaccagtacctttacaagcaaagcaagtgctcttatgagaaccgggttgcaagccagatccatgacatgatgagcaagtagaagagactgaataggataagtctttttttgcacccctcactgcttccatgaaatcgatagtaatacttgcctcaatgtcttcaccaacaaatacatcaaaagaggtattacgacgagcttgggggcctcgagaggaaaatccaaataagtcttcgaaattaaaacctggaaaaccagaagaaaaagaagaagcgccagcaaatccgttctggaatccttcaaaatcaccgccagtaaactctccattcttaaatgcgcctgcaccatatgtatcgaaagcttttttcttcttcggatcctgcaacacctcataagcctgtttgatttcaacaaatttatcttgagcagctttgtcagggttcgcatcaggatggtattgctttgccagtttatagtatgctgattttatctcagaagcagaagcgctttttgatactcccaacgttttatagggatcagtcatttcccaaactgctctagtggcatggaagcatcgtgcatgatatgaaaagtttttcaaggcagcacatcgagaaaactctcgttttgcatttcgttgaattgctacatttcgaaatttggtgcaagaagagcttatgacgaaattccgcctggaagaatgggcaattgactttgaaaagagctgctgagcagaagaatttgtaaaagaatgcaatccacaaactcgggattgtaaatacttgctgaacattttgatgctaaaagaaagtgactcaacgattccggagcactgaataaattaaagcgcgaattttttttaaaagaaattttaaaataagaagtaatgtaaatatcgaggtagagagatgaaatgcgaatgtctacctgaattacttaaaaaaagataaaaaggcacaaaaaatgaacaaagtcgcgagtaataagtggaaataaaaagaataacaaataatatgctattattaagtaccttgccaatgcaatagtaaaaggaaaaaaaaaacaaataagggaaaccgaaacttatgaaagtttctagaagttagtagaataccacttgagcagtgcaatactctcttaaaaaaaaatgtctaattaaacaatttaataatttaaatgtccaatataaactatttgatgagtgtggtagcgtgatggaactgtaccgtcggctagagtataacacatagtctactggcagctcgaaaatcgattgaccattgctatacactacaacttggctgaaatattaggtcagcgataaaattaatccgtttaaggagttaaatagtgtaaaaaacttaactaatattccttaattatcgtaattgatcaatattaatatcgttttgtgaattatttgttaatacatccaaagttatgcaaccagagcaattagcagggtgtgctgtcgttttaacagttacagtgcttactttaagatggatgtttcgtgttgataaaggtggtgaagtttcagaatcgagaacttcgtcttcgggtgtcgataatgaaccacctgtgaacagcgagcatgttcacctcgtcaaaaccgtttttccacatttagaatcatcagctattgcctatgacctccaaaaaacaaaaaatgtcgatgcaaccatcgagaatgcattgcgaggtcaacctctaccgctgccgccccgtaattcctccttgtacgctcgctttccactgtcggctggagcaggcgcttcctctcattcagaagaaacaactccttcgcacgaagtgacatccaacgtgtcttctgggtcaagcgcttcttcgttggcaagcaacgagcacaggagcctcattgaaacttataacttgtcgtccaggatttcttcgtctgacaattcatcctcgtccaccggcaatgaagaggttcgtaatcgttcaaagcttccatcttccaaaaaagagcgtgaagagttgtttcgcaagcgaaaggaagagatgattttggctgcccgtaaacggatggaaggaaagattaaaggagaaaaacaagacaagaattaaatataaaaccaattttaatgatcttttttattgaagtctcttcatgttcacccgaggccccctgtttgattgtttgctccgctattgctttattgaattgcgttactaaactgcttagttcatagcttttgggtctttgcaatatgttgctcgtatttttttgccttttatttttcatactctctctacgatgtgttcaacttatgcaaggtcagtgactttttgggtttctccttcgcaaaatactggcaaagggcattgcaaggaatggaaacagaaaaataacgcaatgctttatttttttggccatcaaaaataagttttagcagaaagtaatatatcgattgtctgttcatttttgtcaaatttctgtagctagtttttataaatatcaaacattaccaaatttaacatgtttactaaatatgcatgctaatattttcagctaggcatgtcttttgtggtaaataaacataaaaccttgacgatgatctctcgctttctactgattcaacaagttatgctaaagacaggtaaatcaatattatcttccttctagtcgcttttgtttactttctgtaaaatagtgaaggtttgcgtgtttgttgaactttaataccgtaatatcattttttgcggtgattttatatactgtttcgtcagttgaaatcgctaaacgtcactaagatttaccatgctgttcggaaatcccatggctccattccattttgccatccacaccatatttgtgaacatttgtgtttaattgttttttctgacttgacctttcttgtgtaaaggtttttcagaaacctaatcattctcatatatttaactaaaaactgacagtacggcttcgtctgtctttgcagcaatcaggacgtaacttggtgtaaggagtcatcattgttacagctccaggccaattcaaggtatttagatatttgtatcaaatcagttacttgtttttttgtgatctagctaagatcaaaggcgcttgagggccatatactttgatatctgtttgtttatattttgaatcggcttgcgagttttaagtaatcggatagctacacctttagtccgtgtattacttgattgctgtttttaggtaataaaaataaaaaagaaactattttcttttttttcttttactcttttttttttgttttcttcgtagcatatcaatttgcttcaaaccgttcctaattcatgggacagacaaattctcgacattcattaattgaaaccgatgaacccaccacatcatctagagtttccatgttagtggacagagtgaagttgctgtggaaaaggtacacaacacctctgtcaactgaagacggtagtcgagaagcacattttgctgttcctagtgaaaattatgccgacactccatctcgcaataccccaaattcttcgaatgggttcccttccgaaaccctggttacctcatccgctcattgttccacccaacctcataaagatgaagcatattcacatcatggctattcaagtacaatggcgttagatgacagtagtctagcacaaacttatcatgagtatgaagaaggcacctctggaaactccccattgaggagagcgattggctcttatgattttcttcatcctcgtccgtccggtaactcctctcgtttggataggaattcgtcacgcccttttacctcctccttccattctgctccatttttaagttcttacggctcatcaaatgacccttctcaagaacgtgtaaacgaatattcacttccctcaaattcaaattcaacttacacgacacctcttcaatcaattaacaacgaacatccccttcccactgttctggaaaataatgctcttttaaataactccggtaactccccttctttaataaaccatttgcgtcaatatcttaatcaagattttagtcgtctacatcaatccccttcacccatccctaattctaatgataatgactctcaaacccgccggtcgtcttggtcatctatcgcttctgcatttaatgactttcctgaagaatttccgaatgccagcaatcctgaagcgcattcgaattttacacctcttaacggtaatgatgaaagcaccgtcaatatgcttagccggttactttctgctgctgccattgaaacagttgcttcaattatgaatagcgaagctaggaatatggactcccagaatatggcaaacggtgaaccatctcgctttcgttctgttgatggttcatttgaacagttcttaaccgaccttcgtagtggaaatttgactaatgttcttcaaaactcttctcaaaatggaaatgatcaaatttcttctgaccctgagtctaattcctcagaccttcaatacttaaggatgttccgttttccgtcgtttcatcagtctcacaatcaacctgcctctaataacgaagcttcagatacaaatggaccggctttggtgcctgtccttatcgtttgtatgcgtagcatttccgagacttccgaggatcatgcgccaactatgactcaagaaaatcaaagccttcataacgagagtagagaaaacatatccattaacgatataaccgaaagaatggctcagtccactgaattttccactgatcttcctcctacattcgagagaagcaattcaactttttcacatcctgaacctacaagaagtgactttagccaggcttttacgccggtatccgatttccctgcaaatctttttcctggttccagaaatttgtttccaacgtccaactcgggtaatcaatctacttcttcgttttcgcgctacaatcaacctactgtttccgtggatttaaggaattcaagtatactaagaagagctcaagaacctgtaaatggttcaactggagaaaatcacattggagatgattacatttcttcattattggatagttcaaattccaattcacaacgaccgttttcaacagtgccttctgaatcaaatgttttttcgaggaacgcctccggcaatttctcgatgtcacaaactcatcagccgactaccgataatacctcctcattttccacacagcctggaaggttatctacaggactccatcattttccgtctgatcgagatttactgtctaatcaaactagacgttctagcttagcacggagctatagatttgaggaacaactttctgttgatgataatactagcgactttagtacgttggcttccaatggggctgccgacatggttactcaaacgcattcagagggaactttctctaatagcacccatggtgattggcttatctatgtgtttggtggtctgtttccagaacatcatccagttttgtctacagttagcttgtttagcgataatcccatgtatgaagacttgttggctcttactacatacctgggtccagcgaagaaaccagtcgcttctcatgaagatgtgaaacgatcgggcggactttttgcatatttcgatgatgcttcactttctagtgctgattcttgtctaatatgtttagaaacttatactaacggtgacatatgtcgcaagttgcaggcttgtaaacattttttccatcaggcctgcatcgatcagtggcttaccactggtaataattcctgcccgttatgtcgggctcatggggttacgacacaagctgaagaggaaaattaattttgacttgaaattaaagctggccttattctatgtttgttcactctcatttattttccttcatccgtcaaatttgttgaataattgttcgcactatttgcttgtgaatgaaatctacataatagctcttcccatttttatggctgctataacctaaaactgcttgaccttgttcaactatctctttgggactttctcatttttctcatttatgaccttattgataaaatttttgtaattttctacttgctgcacggaaacgaattgttttgttgtgcgtcttttgttagaaataacaattgccttttttacaaagctgagttttttctaaaaatcattttagttaatcggtttgcacgtttaatataatttattttccttttagaaattttgcttcgatttttacatattagtttagatacaaaattgatgcacattatcacttttaaatatattttctaacaaacaagagtattcatatttataatcatgtaaggattttaataagagatcatattgaataagcttaaattataaggatttggttctaagtcgatcatcgaaagtttttagaatgacggtgtttgataccctaattagtcttcatgaatacaattatttcaggtctgaattgagttatgacttaaaacttttcgaaaataggaattaacagaaacaacaatgataaatggaaatgcagtgggtcattcaaaaaccatgtaattcagacaaatattaaaagcgagaactaccatcactaagatgtggaaatctcttaaatggtgagctgctgtcacgactaattccgctgtcatgaagatgatgaacacttcttctttgaagcgctataggggtacggggtgttgaagtgagatgatcatgtgaagaacttcggtgttcaaggaaggtatctatgggttttcggggtgtgaaatattcaatagatgcggttgtgggaccacgagtagtattaatggcaacatctcgtttaactaccgaaagtcgaggttctacaaatttcttatcatactcaaagaatacctggcgatgaagatattgttgatctttcagcagtaaggaaaatttattgacaaaatgcaatgttgtaaacgaaaggagaaaagtcaacaaagtcacgcgtagagaagtgctataaaaccataaaatcaaggcatgagcaggagaaaataagcaagcaaaatttagtaaaaattgatttgggctccatactttcaattcaaaaacttgttcatcgccatcatcattatttgagtgctggaaaactggttttacattgggagtagaagtcgtcgtgcgtttgtcttgaggcaaagttctatacagcttattttgaaatcgagtgctaaatatgaaattgagaaagctgatgaaaagaaaacaaattgagagaaatgataggaaggcacgaaaccaggacctagaggtgttgatggactgcttatccacaaagagctggttgcgttgaactggtacatgcgtactttttatataaatgcgcattaagagaaaaataaaattgacagccaagctaaagggaatcgaataacgatctgatactttatcccactctacactgtcaaattgttcgcaaacatagataaagtaatcgatcggaagattgattattttagaagtcagcgatgtacgacggattaactttcccattgaaaagatttttaagcaatgttttgaaattcaggtgtactttttgagtataaaacaacgccgaattagaaatgaaacaaaccatggacctgaaaggtaaattccgatattcgtatactaatgaacgaaattagggcacttctccgtttcaggattcaaaccttacgtattaattagagtagcaaaggctttttaattagctaggtcgagcttgctattatcgacttcaattgcaacaatgaaggataaaaagttttttattaagataactttttaaatccggtacgtaaacaagtgtgcaataaaaaagaaaaaaaaaagaatttgctttcgcaggttgatgttcctaagtattggtgttattgatggtttcaactttaccactactactgctgtgcaaaatcagtcgtcgatttaaaattcctatttttaggaaatataagctcgatcagtgacataaatttaaacagtttcgtttgacgttttactaattaatgaattatttccttaaaatttaacggctgaagttttttttgacttatgtttattgtctcttattaatagtgatgcatgtggtttaactttttatttaataatttattttcatgttatgtttcagatttaaattttttaaatctttatttcacggttgaaatcaaaagtagttaatatagctcataatattcagcaaacaaactactcgccattcttgcgcagttgatactgacctctttttcaaaggactttttaataatcatcatcacagccattgttagaattttgctttcttgttggagagattgcttgaaataataattctttaactaagaatatatcagatgtggctgtgattacaactttttattcaatttatcgttattgatattatttgaaccagcggttaaacaagcattatcctaaagttgattcaattcacataaactctttgctcaatgccacccaaacgcaaagcatccaagaactctgttcgcggaaggaaacgtaggacacggaccaataacttacctcttaatcctgaagtgaaagaggaaactgttgtatcttcaactcaccgtcaaactcgtagccagtcgaaaaagccaagtttgtcttcctcagcggaacctccttctgagagtttagatgacaatatatcagcgttaaactcacttcaaaggagcgcatcttcatccgaaaaaggttccgatgaagacaatgagaagttaggcagctcagaagatgacgagtttgacgacgattttgacacttgggaacaagttgatctttctcctaataaacaagaagataaaaaagatttacacatagtcacacagcatatcactcctcaacttacaaaagaatcgaagaaaggctcttctagtgcaatggataaaagcattcgattatctattcacattatgcactttacttgcttgttgtaccatgggtcagtaaggaatcgctggttaatgaattccttacttcttgatgggctgcgcgatttgcttgtcgaaaagcaaccgtccgtagtggaggcgtgggtttgtagtagccagacgcacgaggatttgttaaaattgttaaatgggcttcggatgtggtggaataaatcttttaaaattgagagtcatgggcttcggaagttggggtatcgtactttgaaacaaggatttgatatcggcttttcgccagaaatatttcataactttcatgaataccaagcatccttactttcgctaaaaggaagccgggatttggcggcacagggatttactgctctctgtcgatctctgaatctgaaagcaagacttatattttctcttcaacctttgacattttctactgcttcctatgatgattggtctccacatatcctccctgaagaaactagtacatctatagatgacgacctccgctatcctattttttggacggaaatctatgatcaaagtgagaagaaatggattgcggtagatgcggttgtcttgaatggggtatataccaacgatatgacttggtttgaacccaaaggagcgtatgcagagtcaaaacatctacgaatgggtattgttgctgcatatgataacgatttatacgcaaaagatgtaactttgaggtatacagattaccaatcaagtaggcttaagaaaattcgacacgtttcttttgcagataagtattttgatttttataaggctatttttgggcaactagcaaagcgcaataaagatgcagaggatatatatgaagagaaagaactggaaagtaaagtgcccattcgcgaacctaaaagctttgcagattttaagaatcatcctgaatttgtattgattagacatcttagaagagaagaagcattgcttcctaacgccaagcctgtgaagacagcaacctttggtaacggtaagaaagctacctctgaggaagtgtatctccgaaaagatgtggtcatatgcaaaacgcctgaaaattatcacaaagaaggacgagtaattaaggaaggagaacaacctcgaaaaatggtgaaggcgagagccgtcacaattagcaggaagcgtgaacacgaatttcgggttgctgaaacaaatgaaccagtgcttcagggtctatattcttccgatcaaactgagctatatgttccgcctccaatcaaagatggtattattcctaagaacggttatggtaatatggattgttttgttgagagcatgatccccaagggcgcagcacatttgccatatcgaggaattgctaaaattgccaagaaactcaacattgattatgcggatgcagttacagggtttgaatttcgtaaacatcgtgcgattccagttactacaggtataattgtacctgaagagtcggctcaaatggtttacgaagaatttcttgagtgtgaaaaaatcagaatagagaagcagcagatgaaagagagaaaaattatttatgggcagtggaaacacttgctaaatgcacttcgtattcgaaagcgtattgaagaacaatatgcttaattcctggctttcgtcggacactttagggtttgtataaccggatgtgtgttttttgaacaatgaggatacttaattccaaacgttagactcatttatttatttattgttttgcaaaattgacatttggttatttgtgaagtattttatttatttaaaggaaaaagaggaagcaaactaccaaattatctaatattttattgatttaaaaaaccccagatttttatagcactatttttcatattggtggatcacactctatttttcgctttatagatcacccaattgcattaccttgccaatcgtactacaaattttttgtttgaaggaacaacgacttaataaaataaaataaaaataaaaataaaaattttcattacacggtaatatccaagttgcttaaaaatagctaagtcgtaaattttattaaaaaattagatatattcatataatattaatactttttagcattttttacgaaaaagatgtagtaaatatagtttagaaggaatcttatcatgagtgttgctaagtacctcggtaacctcgatattatggtatcatggtaggcccatttaacaccaccacgctttgttgcaaaagcgcgtactatgcatatattcttggcgtttaccaaccacgcattttagtcatatagaaagtggagcataagaaatctggttattgaaaggcaattattcattcaattactcaaaaatctcccagctgggtagtaatggtactggaaaggaatttttatgaagaaagcattgttgaagaactaagagattttttgaaagaaagccagaagcccgaagcaccagcgtcgcatgtgtgatagtcagggaattctcgacataagaagagaatttcaaaatggctggcatcactgaacattcgacgattatgaatgatgcaaattttaaagaggagaatgctcacctgtcagatgcatcaatccactttggaagtagtgaacaggataaaacaccttcagattatgaattagatgatgttttagatctttacaatgatactactgaagacgatgccgatgatgcagacgatgttaataactacataatgtctccatcctccagtttatctagcgagagtgaacatgcactagatgctttagtgtatcccatttacagtcatcataacatacttgagcacgaaaataactctgactatgcttcaattacgcctagtaatcatcctgcatttacatcatgtgcttatctgcagaatccagtcgttgattctaacaatgaatacgaaagcaagttcagactttctttagagatacctccaactgatttcttatctacttctactgaactttcgaagcgtgaatcatgccttagtactgaaacgtcctcctccaaattttccgccgtcaccgctgccactattaccaacgaaacccagagtgaaaagcgttcatcccaaacagatccaagccttcctttcaaaaccaactcccttaattgcgacgtcacttatgaagaaggtcctctcaccaaaaagctccgaggacccaaaaagtacaagccctcccattcaagctgggatatatatggtttcaaaaaagccaaccagttttataccgttgaccaatacaacacatggtatggcccttacagccgctacctggagcgtcgcgaacagcgatggaagcttttccttcaagaaaacggtatagactatatacaccaatctcctagtatttttcctagccgcagtgctaaaactcaacgatttattcgcaaaggaataccacccgagtatcgtggcaatgcctggttttattacagcggtggttacgaattacttcagagaaaccctaaactgtacgagactctatggcgttgtgcgtgcataaaaaagccctcagattctgaccttattgaacgtgatctatatcgtacctttccagacaatgtacattttcgacataaatccaagcattctaggaactcatccgacgcatcagagcattcatcagaggagcctgatgttccaatgatttcaaaactgcgtcgtgttctaatgacttttgcaacatacttacctgaaaatggttactgtcaaagcttgaattttcttgctggtttcttcctgctttttatgagtgaagaaaaggcgttttggatgctcgtaattacgtgtcgtaaatatttaccaaagatgcatgatgccaatttagaaggtgctaacatcgaccaaagtgttttgatggcatccgttcgagaaagcttaccagcggtttggagccgcatcagtcttaattttgatggtatacccgtcaatgatattgtggcaaagcttcctcccattactctcgtaactgctgcctggtttatgagtgcctttgttggcattttacctacggagactgctcttcgtgtatgggattgttttttctatgaaggcagcaaagttttgtttatgacggcattgtgtattttaagacttggtgaagatgatataaagtcgaaaagtgagcagacagaggtatttcaggtgattcaagatttacccaaatcgttacttgacgctaatgcatttctctccttgtgtttccgaaggaattttaggcgcactccctcccaaaaggatatagagcgtcgaagagaaaaggttgcaaaaaagcgtaactcttctgcttcaaagcttgaaatgagtgattcttcgaaacatcaccttagtcgttcatcatcacgattcagcaagtcgcatataatatctcagcttcataatcacttgaagaagtctacttagttatgtctgtttaccaattgagtttgcccattgtcaaacctgtcaaacctttactctcgttactaattttatgaatgcccttgttcgttaagaatttggttgattggttcagatttttattatttttttacattgctacattgaacagcccttattctattaattttgaaatgtttgtatgaacgtcgttccatcacttatttgttcagcagattattattttaggtagtcattgactccactatacactcgttttattcgggcatatgccattatttttgcaaatcgatctatttatatgtctcttttgtataattgcctctttcttgtttgcataacaatcgattttatctcccgttgacactgggaatcgagtcactaatgtcggcatgcttgatattattaacatagcattataagatcactgttttatcattttttgtagttagccctcagtctgtatttttataaatcatttgttgctaattcgtttcaacaggaaattgtttttaatgttaatataaagtatgaacaattgatatattaaagaaaacactaagctgaccgatgttttgtaaagtatgtatataaatatatataaaattaaagttttctattgtgtaataataatatggttagtgaaaagggattaagtaaagaagcaactaatgaaagaattaacagtaattataattaaaatcttagaatcttaaggatcgatgttcgatagaaaacgattaattaatggagtttcttcaagtattatgagtccctaaaggatgaaaggagttatgatatagtgagaataatcagtttgtttaaaataaaatatccttttcacacataaaataaaaaagcacttagtaaatgatgctttagcgaaacctatttaatggttcgaaactgcgttgttagataaaaattcacagttgagaaaattgggagacgcaacataggtaaagccttgaaaagcagaggaatggctaccaattgttaaattcccaaattcttcatgaagaatgggtgttgtagaaagaggcaatttggtaaactcgactgaaaaattctccgcagcctcaggattggtgatgcaaggaacaattgggggaggcagcatgcgcttctctaacttattccaatcaattcggcgataaattctgtgcttttttattgcatcgtaacctttctcgggaccatctgcgccgaggcgttgctttggatttttcttgagaaatttgttgataatgtctctagcatcagaagtcacataaaaaggtatgttaggctttgcacgagtgattttttccataattctcttatgattgttggcggtgaaggggggagatcctgtaagaagatcgaatatgaggatacccatagaccaccaatcgacggcatgatcatatggctgctccaacaaaatttctggagcacaatattcctcagtgcctacaaaagaacgacaatcagctccattttcagccacctttgacaatccaaagtctgtaagaaggatatggccttcagcatccaaaagacaattctctggctttaagtcccgatacacaataccaagtttatgtaaatgtatcaatgctagagtcaattcagcagtataaaaagcaaccacatcctcaggaagcatcctttgctcggccaaatgagaaaataactctcctccaggtgcatattgcaatatcagataaagacgatcgtggtcttgaaaagcataataaaggcgacaaatgaacggatgtcgaacctcttctaatatctgtcgctcatttttggtttgttcgaggcccttggcacgaagaacaatgctagctttctttagctgtttctgagcaaacagtcgtccagtatttttttgcttcactaggagcacctttccgtaagagccacgacccaataccgttaagggttgaaagtctgctggacgcatctttccgcttggtacatagttgtcacccttggaagaaataaaatcaccatgggcagcaaccttaaactctaccgtccccttttcatctttggcattctttccatccttcaaatcacttgacgaagtgattgtcgacgcagatgcctccaattcttcaaaatcatatccctcctctgcaatctcatcgtcactagacaaatgggaattgtaattctcattcaaattgtcgtgctcatcaaacataaagacaggcatctttgagcaatttgtactgtgaaggatcacaagtttggcatatgtatgcccaaaatgccttttccttgttgtttggtagacgaacaaaagactgccgggatgtagagcaagaaattctctttgtcatacctcattttgttgattcaaaacgcattgctgattggccaatttagtaaagtttagatatatataaagcttttgattcgccctctttactaattaaagttatcaacttactacttattggaccgcttacataggctattgtgcgttttactttaaaatttttttatgccgagaagctagattagtgatgattaacgtgtcttatacgatgtgctttgtgcattttaacgaatgaaaatgtcttgttgcttatgttgttaccgtaatgtaaggctggctctgtaaaacgatgccagttttatatggcctatgcataccttcttcttgagacgcgcgtgttaaactcatctttcgttgaatggcgaatttacatcaatgaattgagatttaggaagatttactttttacataaagttattctatggtctcagatattttgaattaacattcactgcgtgacaattgcgtgtatcatcattttaatttgcgtttcatgtttgctagtttcatctaattgtgcatttcgttttaaatcaaaattttccaaattactcatatttattagtcctcgttttttacaatgtctcaaaagaattttttcgacgaaggaaagagctatggtgtaaatgactatgccggtttccattttgaaaatggtgctgattcatcccttcctcaggtatcggctcaaggtgtagttagagaaacggacagctcgaattttgatgcttcccctgtcgcatcgggttctggaatttccgatgttggaccatttggcgctgatttccatcaactgcagcagcatgtacagacaccgtatggcggtatgactatgcctgcatcttcctcttcaggcgctacttcagtaccaccggagcaagatccttctttgtctgtatcattcaatcgcttgcccaagtctgcatcaaccaagactaagaatggacgcattcgatcgtctcgtcgggaagacgataatcgtataccattttacgatctcgatgttgcagaaggtgccgaggatgatttacaggaagactttcacgtggaaggaatgaaaacaaaatcgggtagaaagattcagcggccagtcgcatacaatcctaatgccaccgcattgaaacggaaaagtcgcaaggtcgatatggtcaccttgtgtagcgtctgtcaacgaggacattctcctttatctaatcgaatcgtattttgtgatggatgcaattctccatatcatcagctttgccatcaccctccgattgacgatgcaaccgttcaggatgtggatgctgaatggttttgtatgaaatgccagtacaggcgtgccaagcaacctttagaaacgggaatgacggcacaagatcttgggttaagtgaatcagacaaaaaaatgtatctatcaagtttacctactcctcatctcgcagatcttattcttttttgtgaaaagtcttatccatctcttcccatatacaacccacgtactcgggagttgttgggtgagattcggcatcaactacttgttagttctgaacgccaacaaatatctttacaagagcgacttcatgctaaacaagatgaagctccctctgatgagcctgcacctgtcccctataccgcaagttatgttgcgaattctggaaccttatacgactatccaacgttaatacggttagctattcgtaacaccctctcaccttccaaagatgaaatatttaactggcttgctcaaaacgtaccattgttaccaacttttcacgacagcgcttccgaggccattcgttggatggtaaataaaggtcaactggtccgttccggtagcatctatcaaatagcaacagtcgaagaataccctcacctccaaccctctttacttcctacttttcaacgaaaccgtaaggtacctaaattggtgcctgtctctttccccaccgatgatcctcaaaatttatgtgctactgttttatgaaactgaacaaatttttctaaatgtatagacaaaaaaaatttctttacttcccgtttttaattaaacggttgcgtcccgttaatctcgaaataaatttataagcggtcgaaagcaatgtatcattacaccatgtattagctgcaaatcaaagtactttagtatttccttcatggattcaaacttttcactcgataacaaatctagggaaaatacataaatcgccctacacactttctgtttacattataaacttttcgtttggaatgtttcctcgccatgaaatcttaaaataaaataaaataaggaaatgaacaatttctcaatttagcaataattaagaaagtcaatgaagtataataaaaaataattatttttaaagtatgacttacaaccattattatcggtcaatgtcagggtgttacagcgcaccttctacttaccaccaaagatgaggtccacgttggctagcgctcagaaagcagccgtacgtattccaaagggctttgtatttcctgttccaaaagtaaaaagtgctcctaaggtttcagacacgcaccctttgtggaatttctttcgggacaagcaagcccttccaccaccatcggaagaggctaaattcggtagagcatgggctgcagaagagcttcgttggaagtcttttaatgatctacatggactttggtacaattgtctccgagagaagaacctattgttcacacaaagggctgaaatgaaacgcttacagttgactattcccaaagcctcaaatgagcgtgtacttgcagtcaataaaaccatggcagctatcaaatttgtcctatgggaacgccaaagagcatatacttctgccaagcagctcgagaaacaaaagggatcttcttaaaccccttccttttaggaaaacagaaaatcatccaagtatggctttattatgatctaaagcttcatcatttcacaaactttctaaaaatataccctaatacacgagaaactgttttataatgatgataatgattttttattttgttcacctataattgttttctttattttgtttatactgatcataaaatctcggttgtcccggcaaccatgctaatgtctttacacgaaatttaggaaatcgcattctatccacatccatttgtttagacttttgtttcgtgtgacaatcgataatttgaatgaaatagtttttttctttgtttttcggatccatggattgtggaaatccgctgtttttacaatggatacaggagtggatggaagagtcgacgcgtcgcttccccaagtcatatcaaacctggagaaaggtaggaaatttattggattagtgaaaaactctttgaaaaataaataatttaaatattaaattaataatgactgtaatttttcgaaagcttttatagcttcgtactccataaatatcataacaatcactgttgttgttgttttaaataagaaaccgtgctaataattaggcctacgattcaatgaaaagttgccccatcacatttcatcgtccttctcaggcattggcactgaagggaattggccctacgatttgtgccaagctagaaaagaaatggaacgcttactgtttggaaaataatattccaattagcacgcacaatgaacagaatgattctcatgtcaatgctaataaatcgtcttctgagacttcttctgaaaagcctcgaagcgttaaaaaaccgactacaagaaagagaaaggtctatgttccgagctatcgttctggtgcatattcaattctttgcgctctttatatgcttaataaacacgaattcgctacaaagcctcaaattgttacgatggcccaaccgtattgtgattcgtcctttggatctgctacagaccgaaacatgcgttatactgcatggagtgctatgaagactttgatcacaaaaaatttagtttaccagacaggtcatccctctaagtactgcttgaccgacgatggtgaagaagtttgcatacgtttggcaaaagtagacgattcctttcaacggaaacatactgtatcaaacttttctgtctctaaatccgatgatcatgattcctctttatgccaacctccaaattttgttacatcaatcaataaagcaggaagttcttcagaccacggaggtgaactacatgttacttactgtccggtagatcataatgaagtttctgatggtgttgaaaccgatatagatgttgatcaggtggattcgttgaccggaattcatgatcaccatatcattaacaatgagcagttgattgacttgacggaacaagaaaaaaagcaaccaaatgaaagcaatttgtctaacttaaaaatcgagacggtattattctcaaactgtacggtttttcttctgattgatactcgagaaatacgttctcccttggatcgcaatcttattatcgataaactgactaatgactttggtgtcaattgtcaggtacgatcattagaattgggagatgctttatgggttgcaagggatatggaaagcggtcaagaagttgtgttggattttgtcgttgaaaggaaaagatatgatgatttagttgcttccattaaggacggaagatttcacgaacaaaaggcacgtctaaagaagagcggaatacgttcagtcacctacattttggaggaatcctcttatgatgaaagtttcacggaatcaattcgtacagctgttagcaatacccaagtcgatcaattatttcatgtccgtcatacgcgatcacttgaacacagcgtaagtttgcttgctgaaatgacaaagcaaattaacctgttttatgagaaacgtaaaaccctcgctgtcattcccgatttgtcgatagaagccaaaacttatgagtcgttacgagagcaacttctaaaaattgatccctcaactccttaccacatatcataccatgcattttcctctgtcctctcgaagtcttctactttgaccgtgggggatatttttattcgaatgcttatgactataaaaggtataagtgcttcaaaagccatcgagattcagaagaaatatccaacattcatgcatttatttgaggcgtacgaaaagtcatcatctagccaggaaagaaacttattactgaataagacttgtcaaggctatggttttcaaacaatagggccagcactttccgccaaggtcgcaagcgttttctttccagaatcttgagcctttgaacttttatttatttatgattcataatatttattcaattttcttatcatttcccatatatttaatttacctttgctttaccatcggaaattgcgtatgttagtgtattgcggtatataggtagcatcagattcccttcaaatcgtgagtttctacctagcactatccataaacaaaaccgttacacttggtattcgtttttgaaactgctgtatcatgtcacgtttaagagctcctgttgctaaatttttagctgatggattgaaaggaatcaggtctacagctttggctggctctcgattgtctaattgtcgctataccagtactagctcgaaagatactgatacctcaagccacatgactcattttggatttaaagacgttccggaagatgaaaaagagcaccttggtatgtatggaagaactggtttgctaggacatgtgatttgattgtaaatcataacattttgcattttgcatttactgaagaaatttgacttcaatcttaaataggtactgattctaaccttttaattagttaaaaacgtgttttcttccgtagcgaaaaagtacgacgaaatgaatgatgccatgtcattgggaattcacagattatggaagaatatttttgtttccagattgaatccaggaaatagtaccgttcccatgaaaattttagatgtcgctggtggtactggtgatattgcatttcgtatattaaatcacgctacaaatcacaacggcgatcgaaacactcgagtcatagtagccgatatcaatccagatatgctcagcgttggtcttcgtaggtctaagaagacgccttattatgactccggaagagtggagtttattgaacaaaatgcagaaatcttggacaaaattcctgacaatagcattgatatgtataccattgctttcggaattcgaaactgtacccatatccctaaagttttggaacaggcgtatcgagtgcttaagcctggtggagtgtttagttgtttggaatttagcaaggtgtatccagctcctttggctgaattgtatcgccaatatagttttaagattctccctttactcggtaccatcattgctggtgacagtcaaagctatgaatatttagtagaaagcatcgagcgattccctgatgctaaaacgtttgctaaaatgattgaggatgcaggattcactcttgcaggtgaaactggttacgaaactttgtcttttggaattgcggccattcatactggtatcaagttgtaggatggtatgaaagctatgacaggttgtataattcttttaatgttttattgagtaagaagaaattgagttattctgtaaagtttatacttcagaattcttagagctgattttatgtttatcgactgcaaaggcataatgcgcatacttggaatgaaattactacttttacaggcataccattcacgaagattagatccaacaccgttcttttactacatttaatgaaacaaaaataatttcataattttttatattgaaataaggtttgtgtaaaacaaaccttgtttttaaactagtaaatactatagtattcgtttctgaaaatcatcactgtcttcatgaacgtaaatatcctaaacaacatagaagcatgaacatgcactaccaaataatagataattaattagggaccaatgcaaaaaaaaagacacggagaagaaacattaaaaaaaggcaaccgcggtccgatgggaaaagcatgaaacagatggcgttatgaaaaaagtaatttcgtaacaacaaataaaaacaatcgggtccagtcaaaaatattccggtaggcgaatagggaaaataaaaacgcattttaagacctcaacagaggaaaaaaccgacaacgaaagtaaagacaatttgacataaaaccggttgtcctataaaatgaaaatgacataaaaaataagcacagcaaccacattaaacaatattagtataaggttaaacctttttgagctcttcaggtcctttatagcgactaatttttaaaaaaataacaacctaagcaagacctttggcatattaggaaaggttttttacaaaagttgataggaggggaagcatatccgactccgtttgtcaatattccattcgtaaagatgagtggcggatgcaacgtagacagaagaaccgtcatctgcgaaacaggagccgaatatatcctgcgacgcaggagaaaagaagcgatcttcacttggaaggaccaattcgacatctttaccagtgcgtaagtcaaggagatgcgaataactgaagccttcagaataaagcaagaggtcaagaggtccgccattcggaggggtgaaatggcagcttcgaatacttccgttagggtcaggccttgatgaggttttagtgagcattggggtcctcaaataacgtacatcaaaaacactcaggctagaatcttgactagcaacggcaaacaactcgttacgctgagaaatacttgtacaaaaagaggaatcggtagtatcagcgacagtagtatgtcgtaaatgatattcaccggaacgatcgatttcgtaaaagaagacctgaggagaatcgccaacacaaaccataaaacggccatcattgctgacagatgcatgattcatgttgactggaaagtgcaattgcttgcgaaggagaccatgctccaaatcaacgacttttatcgtgtgatcattactagatataagtgcttcagcatgagaatcacagttgcgtcgatgaatttcaatgccattgttatgttggtcacaaagcttcatgtgagtttgttttgaagttggagaccagtaatcaaattcaccaagttggccacctgcagcgatgtatccgcattttcctagcaagctcagcggtttaaaactgagcccttggcccacctgaacgaccttctccgaatttgggtatattttccaaacaaatacgctgttggtatagtagattggattggactcttcgccggtattttgagtagaaatgaggtttttcaactgccaatgatttgaacaaacacgagcaggatgttgtttaggagtcacattccttaaacacaggctggagttggagcacctattgtccaccgtcatcccggttttgaagcgtaaacgcgtagacacgctcactttgaagaacaagagaaatcaaataaaccaaaaaaaaaaaaacactccttaaagaatgttttatttccttattaaaatagccaaatcagacgaaacgtgtctcaactgtaaggccttatgcacacaaaaagtagaataattaggtaaatatcagaaataatttagaaggcgaaaattagattcaattcacaatgtaacacttcctgtagaaataaattgagtcaagaatcaatttagaataaaaattacgcaagccgtttctaaattgaaagaattgtctgcaagtaagatgaatcgtggataacaaactatacgattcaacaattaacaaggataggtttcaaaagagtttggttaaggaataaaaaggaaaacgtagatacttttataaatgtaaaatattggcgaaatggaagaattggagaaattgaggctgtaagaaatttcaattataactactggggcaacattgatgagggtgacgggttgatgacaacaactattatgaattgcaacgaactaccaaaaaaaaataaggaaacgttaaattatgataaaagaaattttgagataatggcgagcaaagagcactaaagtagtttagggtgttattaaagtatgattatttacaattgcgacgtataaagtggattagcgtattcaattcttgaattcaaaaagatggatatctagtagggttatgaggaaaggatgaaagaaagagagcaaaatcaaaatagggaactgaagctaattcgatcgaattgtagaagggttcatcacaatatgtatggttacgttgtgttgctaaagctcagcagacagatgcaatgtaagcagggtagagagaaaaaaggaaatttttcttgtaaccttgggtgaaataaaaaaaaagggtcatataatatttagcttaattcatacgtaaacactacccctgtggtattgaggtacttcaactttttattccttctcttgctcttcggaaaagtaccctttcaaccactgagcttccttttccatttcctcaagtgttcttggcttacgatcctcgtccttaggaatagcttgcctcatactggttggcggtctctcatctcctgcataccgctcatttcccgtaagataaagggaagcaagatttccttcgtttttttccaactcactgtagactagatcgttttctgaaaaatctgcctttttacgagggataatgtgaacatgtacatgaggaactgtttgaccagcgtctacaccatcctattgagttaaaagcaaaatgtcagcttctaaattaaaacgattttttattttgaatgtgaaaaggaatatgtttttttatttattccttgactatcaaagtacttacttgaataccaatgtttgatgcagatgccgaaaacaccttttcgattacctgttgcactttgcgaacagaagtaaacaaatccgtcaactaagttttcattagttagcgtatgcagattccattattttttcgaatagcataagaatcctacctctgaaggtgtcaaatctttcaatctagggaccgcccgttgcggaattaccaaaacatgacctggtaaaattggtttcaggtttacaaacgcggcagataactaaaatcgttagcagctgacctcaaccaaagaaaaatcacaaactgtctgccgttatagaataaataagaatgacaaacaaaagtttgcaaacaccaatatctacacacatgagaccgttaacttaccttagtacgataaaaaacttgacttccaacaggaaacttggagaaatatagctgttttggcattctggcttacgaatattgtaagaatctaagttgttggttgaattcagcttcacgatgctcacaacccatatcgcggagtccctggagagtcatgtgcgaaagtgtctatggaatataataagaaagattgatatacttaaaaaacaaacagactatgagaaaatagcgtcttgcatatatgtaagtaacagtatcatggaacagataaagcggactaaaaattccaatattatcgaattttattattcgtatgcacacaagtttcaaacggtatcgaaaccactaattactttccaaaaaattgcactacggcacttttgtttatattgtttttaccatatccaatcatgcaggatactgattgaatatcagcacttacaatagttattcataagagcattaaaaattttattgaatcataaaccggaccaactatttacgagttgacacttgtttttaccatcaaacaggcaaaacaggtgaaatctaagttagtcctttattaaagatacatcaaatatgttaaggtcatattcaatactaaatcaatgtaagccatcagttgaaggatgacataacattaattcattgttgagtgataaataatcgtgtttaaatataatctcacacgaaccgttgaagaagtgtaactcacccacctatgtctattatgaagacaatttaaaatatgcatgcagattgaactagatcagaaagaaatggaaaatgcttttaaaaacccctgcatcatgaacagacagaatgaaagggtaaccagagacagaaaaaagattaagtgtcatcaatcttctctctcttctctgagaaagaaaaatgcgaatatactcgacccacaagtttttaaggataaatctaaaaaaaagctttttcagatgaatgattatgtataatttatttagtaattataacggattttgttagtatttctctttttttttggtgaaacacaatctgcttcttaataaagtaaacgagtgttaatcttgcaaggtaaagattccaacttttggtgcaaggcctccaaagaaccaggagtacagtcgctaatatcagcaaccaagtaagcaatgtcaccacgagaatcggagaattgagacttgatgttgtggtcgataaaaagctcgttaacttggcgaagaacaccaggcacatttctgtggacaaacaagacacgagcagcatttctatcagcctcggtaaggctgcgcaaagagacctcagggaagttaacagcaccgatactgtttccttcattaatgtaacgagtaagagcctcactgacctcaataccaatgttatattgagcctcctcggtactaccaccaatgtgaggagtcaaaataatgttcttgcaatgggtcaattcagaagtccaagagttgagtgagtcaacgaacttgtccttaccgttaccagcaggctcggatgggtaaacatcaatggcggcaccagcaattttaccagacttgctagcatcaacgagagcgggaatgtcaacgacagtaccacgggaggcattgatcaagtagctaccctccttcatggcggcaaattccttggaggaaatcatattctttgtttctggagaagcaggaacgtgtaaagaaacaaagtcagcacggtgaaggagttcagggagagaagagagctgcttggcggaacccaaaggcatgatagggagaatatcgtaataaacgacgtgtaaacccatggcttcagcgagaacagaaagttgggatccaatatgaccataaccaatgatgcccaaggtcttaccacggatctcccagcatccactggacaccttgttccactcaccacggtgcaattccaaggagcgatcgcccacttgacgagccaagctaatgatatagccgatgaccaattcagcaacggaacgagagttggcgtatggagagttgaagacggcgataccacgttcggcagcaaagtccaaatcgacttggttagtaccgatacagaagcaaccgatgacaattaaactgtcggcagcctccaagacacgacgagtcaagcgggtcttagaacgaatgccaatagcatgaacgcccttgatcttctcaaccaaatcgtcctcgctcatagaagttttcaagaactcaacctggtagccctcatccttcaagttgctcaaagctgattgattaacgttttccaacagcaaaatcttgatgtcttcggaagcgaatggcttcaaagtacgagcaggagcttgggagtaagacttgcgtacctggaagtgattcgagaggaaggatgaattattatcagggggagacaaagataatttgttcaaactatcctcgacattaccacgacgaccgcctttaatatccatactttaaagaatcaaaaaaagaaaagagaaaaaatttaaaaaaaaaatatctgtaatgtaaagatacaagccaaatccacctaaaaaatgaatgagatgagatgacaaaaatcaaaaggaactttagtcaatccaacgctttttcaaaaagctaaatttcgttgttgagctagtaaccgaagtcttcgacgttggtagaggaaggaacgaaggatgtaggtagaaggaaaaattttcaccagcaaaactataacccaacaaatgagtgcagacgagacacactatatataacggatgattaggtcaccactataatgaattgcgactttgatggattcgtgattgaaatcgatcataccattgaaattgatggatgttgattaaacgggttgaacggtcacgggaaagatgaaaaaaaaaacattagatgagaaaaaaataaagacaaatttgtaatagcaagcaggtacgagaattgggcttgagagaaagaaaatataaaataaaaaaattgaatatagaagaaaaaggtataatcagaaataaattcaaaattttaagcaagaaatcgtaaaaaatgaaattttcaactagaaatgtttttctttttccgtttttttttagtgtacaacttgctgtttttagaggaatattcattattacttactatttactagtatttgctttctttactagtatttaattattaaaaaattgtgtttttatttttgtatcccaactaatttatttatttattctttctttcttttttatttactataacttgtgtgttttccctactttaaaattatttgtttcctttagtagtagctagctggattttatttctttgtacctttgatagatcatttgtagaatccattttattaaaacttacgaggaaaaataataaatcaaacaaatctgatatatcacatgagcttagttaaatttgaattgactttcagtgttttgagtccaccaaattgctgcaacaatattatacaactaaacgcattccatcaaattggacgctgttttatttaggacctttgcattatatactaaaaacattcttaagttgcaaatgaatataaagaattttcaatataaaaattgccaaaaattttcgacaccagcaggatttgaacctgcgcgcggagaccgcaacagatttctagtctgtccctttaaccactcaggcatagtgtctaagtcgaaaattataaaagctataatatatttaaggcaagtattaaaattaaaatattagatgttgtaagagatatgtcaaatatgctttaaatttagactaagataaattgtagtatgcaatcctccatcccaattgtaatcatctccattatttgatgattctaactttaaaaaacaaaactggtatctgttaaacgctagacgaacttactataacaaccgaacactcttttacaatgcgctccgcatttttttagtttccttcttactccaagaattgcaagcttctttatgtctaaaaaaacgaaaaaaaaacaaatcgtatttttgataaactttgacactcatttctttcgaaatagccttttatgtaaacacatcgggtttagttataccttcccaacttcttgggtagagtagactaactaggatgcaacccattcatactatgaattctcaattgcttacttctaagtcaaaacaaagcattattttctagaaaagctcgtaaaaagggttctcttttttaagctttactaaaggtcaatttttacagtcagtgttttcaacttggtctaaactaacaataaaaaactatcactagttcttttcgcaagcatttgattgaaaaaaaaggcaagaaaatattaaaacgtccaagtttgtccgagcgttttcatcatgattgatcaaatataagcattccaaaatctttaaaggctttcgtactcaaactagaaactcggaaaattcgccaagaacgatcacacctcccattatgtagacgatgtcgtttaggtcttttaaagccattcatctcaaaaccaccaattccagtaaaaaataaaacacgtcgactgtaagcatttttatttgataaacgaaaaaaactcgataaattggaagatatttaaaaactttataaacttgcagaatctcgtccgcaagcactcacatgtggtccgaacctatcctgtacaacaaaaggtttacaaatgttgcatgaaaacctcaagaatcatacttttcaagtatctttcctttagtcaaaacacagaaaacccattgttattaaccccataatatatgcacattatcgaaattgtttattgctgacggcactcagcagcgttttgctggccatgagcagtgtgcttgctatcactgtcctcctcatcggaatcggaaacttcttcgttagaagaggattcaacatcatcttcatcctcttcaacatctaagtcgctgaatccgtcatagttttcaagagctaaagcctcaccagtaaaccactcaacggcacgaggaatgagtttctctttgaagtcctcaccgatttgatagtcaagttccaacaattcatccaattcagggctctccgattcttcgtcttcctcagatggaggagttgggggattaaaaaagttgaagaaactgtcacgaggaacggaaacctttacgacacgagtttgtttagtgtttttattgcgttgctttttagtaacggtacgaacagtcaaatcggcattttctttccaatcaaccttatcgccctcagcatgatcatacaagaaaacgttggacgggccagattcctccatgtaataataagttttggtgagaatcttgttagtaaagaatgggttttcagcaaattcaaattctaatttgaaaccaggcttttccatataggaaatgcgaatatccacaaggtgacttaaagctccttcatcttcgggagtaatcatttcagacaaagacaaaacattcttcatagcggtcaaccagaactcaggaatacccttagtatcatcaccaccttcttgtttcttagactcagaagaagtaggttctttcttttcgttctcatcggcagcttcacccttcttaatttcctcctcggtaggttcgtcagcgccacgaacaacctcagatcttctcttaaaaataggtgcgtacttctttgcataagctttttccaactcaaacagctctttttggaattgagactccaagtcgctgtatcgcttttgcaaaccacgaagtccagaaatccttctttgcacggcttcaggcaattctgaaactccttctgaagtgagatgtaataaagaacccaattttccgtcgatagcctctaaattctcatctccttcgtcaatagtatttacttgaggagccttcgcaccaaagttgggagcgctcgtccccgatggggtgttatggggagttggggcggcagacatttttccggcccttttgttattaatattaacgttctctaccatattaattctacttgttccagcaatcaattatgcttcagacgctttccgtacgtccttttaataacactgggaagggtagtggtagaagctaagtgtaagaatatttgctgcaccctgggaatctacctacccgcggaacttccgagctcatcctcggggtttccgaccttagtgaacagtgcatcgttgtgttacggacactttctttattcccgaagggggtttttaaaaataaaattcgatgaatttaggctcatagttaatattatttatatttttaagactagtaaagatcaggaagagctgaattaactgtagaagaaagccctttatattctaacaacattttgaagctagaatctttttgtctcattgaaattattctatcattaaattaaacatcagtcgaataagtatcgaaaattgaggtaaaaactttgctgaaccaaaggttactttttaaatgttactgggttaaatttcgtttttgcccaaggctacattacgacgattaatagccatgaacaactcttccaaattttgagacaacgacttctcaagtgttaaacgagtttgggattcattcaaacgctcagcatttcttttttgcaatatacacaaaaaatctgctaataagttaagattccaatgatctggaatttgctcgcacacgtaggaaagcgtataagaaaagggtcgacgatacaatagttctttaataaaatcactacatccatctcctgttgatatacatttttcgagcaaattgcaccaacactgaggataaacatcatcaatttgaagacagtatgcttcaccgcccttatagtcatgaatattcgtaaccaaaacggataaagctttttcataattcttcttccttttgtaaaacgagtgttcaagttgaggaaatagatataaattgtcaacatgaatgtcgaacaaaatatcttttattttatctatagattcttcttcaacattttccatcagattaatagaacacaaatagtaaaatgaaagatgagtactgaaatcactcatgtccccccaaagttgttccaagtattgggcatacgtaggtttctccatgcaaggaagctccctaaatgtttcaatggcagtctcaaggcgatttttaaaatcgttatgatccaataaactgccaagcaacttattaacgcacaactttaaaagtagcgctcgatgagtgacggaattcgactttacaaggtaatcaatcaaaacatcatcttgagaagaatccaaatgctctaacacgtcctctgcagaaatggatccactaactgttttgtcaagcaaaacgcgcgtaccctccgttgcatcgtgtttacaaagccatgtagtaaattcccagaatgtcgaaggctcaatatcattaaccaaatattctcgtattttaattaacccatcgttgaatctccgatcttcataatcccctgttattaatttcttccaagtttgaagaacaccatcgtgatcccttacagtagccaataacacggagagtaaataatactctttcttctgtatcaacacatcttttatatcttcaacaccagttagaccagactctaacaactccttagcatttttggtaccggcggctaaatcatccatatttaaataaaggagtaataacgaatgctctacagcaagcatcacgtctctttgcgaagataaaagatactcagatatgctcgtgttctttttgtaatttttcagataacgcatcaacatgatgtatgcgttttccttagtaatttcaatcatttgtctctgagtgtattgatcagtatcacgaaacaattcattagattttaaaacattagcaacagtatcatcgacggacaatatgcttttgcgaaaactaatgacaccttgaaaagcaatataggaaagctccgaatgatagagatctggatagagggagataactacgcgaggatcaattttggaagtttcaagcaaagagagagaattttcatactgtccttgcttccaatactgtaatgccgagatttgctccaaataagcagattgaagataagcgacatcattggttattccatacttcttcggattccgcaatcgcttactcactcgacgcagaggggcttcaatatcgcctatggtaatactgaattctagtttgttcataaaatgagcttcagcgccaaacccccaagatttattcgtaagaaaaataaatgaaggcttgctaaaagaagccctttctatcgtatcagaagtttttgaggtagacgcagtattcacagcagagaatttactaaatatttggcgatcacaaaaatgaacgcttgtcaatcgagaaataaaagagaaactttcatcatccttcagattaatacttttaacaagactgagagtatttatgtcgatgatctgtaacgaactagaagaaatggcgaacacataatgagatgtagaaaaaacatgttttggataaaatgaaaaagttagagtgcttcttgtgacattcccttgggaatctacaaaaagccctatggcatctttgggactaccggtaatcaagagaaattcattagaatgcaaaacaatcatgggtttgtacattagcccattattttccgaatcgtatttgataatgggaaagaggggagtagtatcaaaggtgagaatatccaataattcaaaggaattttcggtaactagacaaacgatatgaccattcacacgagcagtttgaatattggggtatttaagttccttgtttattgttaattagcgcttttatgaagtaaacaatttagcatctaacatacatttttgactagtatgattccatctttttgaaatgagatgagctttaaatgagtattggtcacaattaaatatgtgcttttctcgtcaatacgttggcctggatgacagaattccaccaagcctttaaaggagatggaagggtaaagctgagtcaaatcatcttccttgtatacttctgcgaaactacctaccaccgttaattggtattccaaagttatcgtaaaccacacatagcttaccatgatgaataaaaactgcgccaagaaaaggcattgcaagaattcggtttacacgagatttcgacaccaacgaaatcttctttacaagctctggtgattcatttaactaatacgcgtgttaatgcaaacaaccctgtgcaacacacgaataaacacaaacctggaaatttgaaaaattatagaggaatacatcaccaccttccgttccaaagtatagatggttatctaaaaaaatcaaatagttagcaatatagccccggatgcttgccttactatagagcgcaatggtagttacaggggaatccaattctttaggaattgctgactcatgcagctcaatatcagacatttgtaaattttgaattaatgaaaagattcattaaacaattatattcatgaaaaagccctttgtaagtgtatctgttgcgttaatatggttactttcaatatgagtagatctgggtagcgtgtaacccatagtaaacgaaatgttatgatatagaaagaaagtaaatttagaatttctgctaatttaaataaaaattagattctattacaaaactaactattcaaatacgtggaatccttataggagattctcttccaatcttaatccatagtaattctaagttaacttgcaagcatcctgggagttatagcaatttgagatagcctcacagagtgaaatagcaggaactataataattgcacacagaagtgattgtatgtttgttgactgacttaatttcaagtctcttcgaaaattaattgactgaataatttgatagctgatctaaaaagattggccttttgtcaataggctttgcattattcccaaaatacaaggctacaaaagcaaaatcaatacaatatacaatcacttttccaatcgaattaagcgcctaatacatattactcatttccataaaaacaaattcttatagcgaagtgtttaatggaacgttgtgtaactcccaattcactatttcagcacgctgacatcgcgctatttcattgaaatgctaagcacaaaacaaatactaaacattagtcattttagtgtttcgttttaataacttgcaacataatggcagttgcttcagaagctttactccaaaagctaacggagtcatggaaaagttcgtggtgttttgaatttttaagcaaatagcaaagttactaacgtgagataatagattcgcggtttgaggaattacaacgggaagcagatgaagctgcagcagaaattgagaagatgcaaaagacatctttggatgaaaggaaagagctttcgtcaaaaacgaagggtatggtgtctattattgcagcatacctagtatacattaacccttgctaatattgttaatatacagaatttcgcaagcagcctgatgaagtcaagctaggcgaaatgaagggccttttaaagctttatcagtctggaatcgattctttgaccaaacgagcaaagtccgctgaagcaacattctttcgagtgtatgaaacactaggcgaggttcctgatccctaccctttgctgattgaggctgcgaacaaccttaaaactcaaaaacagattgaagatttaaaaaaggaaaaggaagaaatggaaggctcgctacagggtaaggaaaagctggaacgtgaagtggaaaatttacgaaaagagcttgacaaatacaaggaccttgtagagactgaagcggaaaagcgtgccgcaatcacaaaagaagaatgcgaaaagtcttggcttgagcaacaaaagctatataaagacatggaacaggaaaatgctagtacgattcaaaaattaacttcaaaaattcgggaattacaagcatcacaactagatcatgatttacaggccagtcagaatgaatcagcagggttggacgttaatgccaaatctgccgaagtgaatgctattctttctgaattggatgatgctaacaaaatcattgtcgaattgcaagcagaaattgctgtgctcaagcaaaacaccaaagagcaaaagagcgggtcgtcacaggatgacctgagtaaccagcagaaacaacaattggattttatggattctcttaataaaaaattgtctactgaattggaatcaataaaggaagcatcaagaaaagaaatggaaacacattgtgccaccattcaaacgctggaaaatgaagttaaagaggcccgcaaagttaaagaagaaagcttaacattggccaataaattttcggattacgacgagattaaacgagaactatctgttttaaaacaaattgaatttagtggagaacatgcgactcatgaaaacacttctctagagtctcaattactcaagcgcgaaaagcaactatctgaggagttggccaagctacgctccacaaatgcccagttaactgatagaattactcaagagtcgaagaaggcttcatttttggaacaaaaagcttctgaacaagaggaggtaattcgaaaactagagaaagaccttgccgatgttgatgttgagggaagtgtttacttgtccaacaccacctatcgccgtgaaggaactagcggtcaactttctccaacatcgtcaatcatgggtggcaatcctagtttatttaacggaagcgtgttgtcaaggaattcagttaacgaaactggttctgccattgttgacgttatcaaacagcaaagagatcggttcagacgtgcgaatgtaactttagtaaaccaagtgagtgctgcaaatgacaagattgcattattggagagtaaattggaggaggtggaaaagagcaacacccttctttatgaacaaatgcgttttcgcgaccattatcagaagcatgttgagcctagctcttctcacctccaaactgccgcagcctacgaaaacagcatttcaccgtttgcctcgtttcgtaaaaaagaggctgaaagagcttattcgagaatgggttcttttgagcgaatagtgtatgctttattacgcaccttgttattcagcagagcaactagggggttatttttcatgtatctaatacttttgcatcttttcattatgattgttcttttaaaattgggaatcgctggcaataccgcatatactcctatgaattattgacgaaattaaaagtcactgaacgagagtggagctagtacctactaataagcacttcaaatattgccttagatggaaagtatgctgtctcagggaatggattatgaagggaagggaactgaaatagtgtgtatacgaaaataacgctcatctacattgatctgtttcttttatatatataatatatacctatctctatatatatcaacaaagaacattgaaacccaccatggaactcatttgttttgttttgttattttttttttaattttaatctaattaatttattcttttggtaacattccagctacttgtttgctttcgtatagatttttttttctgttattattgagaagacacttttataaaattacagtcaatttctaaggactacccacaacataaataggaaatgaaaaagaaactcatattacaaccgaatccattcgtaaaatcaaatagggacgacctttttcaaaatctattttaagcagaagtaatggccttacgagcagccaaatttctagccttggcaccttgtttcaaagaaacacgggaaacggtgtcattagccttgggaactgcttcctcctcttcggcaacaatgatttcaatgtgggaagggctggaaaggtaagcagtgacacgaccgtgtgcacgataagtacgtctgcgttgcttgggagcagcattgacttgaacatgcttgatgatgagtttatccatgtccaaacccttagcttcagcattagcctcggcattcttcaaaaggtcgtagaagaagttgacggatttaacgggccagcgagcctgggtaacgccaaattccttgccttgggcagtacgaccaacaccaccattgaaacgacggaaaggaacggcttgcttgtgctccttgacgttgtcaagaaagatgaaggccttcttcaagttcataccattaatggtaaaggcaacttcacgagagttcttgaaatgagttctcaaataggcaccacgagccttggcgcatttggtctcaagagcaggagctgcagaataacggaccatctttaatttacaatttgtcaaggcgtttgcgcagtacaaaatttgtatggcagcgtttgtctaggattctctgtgactgttttttagggtagtactgtttggtggtgcattggtaaaactagtgctgcaacgtattctgctatttgtatactgcgagctagaccgtgcaccttagtatagcactattttctgagtaaataaatattgtacatgaattaggtctatgaatactcaaattgtgtctatcaaactacgatctcaatgaaaaatagcagagttttattttccttggaagtctactttatgatatacaaggaaaaatagataccatgtttaaaatgttgatgcaagtacatttggtaggtgaaatagataatcaacaaaaacagtttcttaggccgctagttgtgattgtgatgaaagaaatgtatgttttcaatgacagagtatttttttttaaatcaataaaataattttatctgatgttctactaaaacagagtaattaaaataatcaatttgaaagttagtgggtcgacgctgtttaatccccataacttacttgtaattgtaagtacgccttaactgtagaacagtaaataggtaaatagccaaatttgagcaattgagcaatcgttatcttcttaatgagaaagaaaaataattcaataatttgttttgctaaccatctaaaacctcacaaccttgtttagttgcttttcatgtcggtgtcctaggcatccctaccacacttctggaaattaccaattgccaacatcttgcatacatgtccttggcaaaaaagatcgatgatgatgaaaaacagttagtaaaacctgtgaataaagaacaaacgtacaagaaaccaattccacttgaagaagatgactacatcgagggtttaagctacataattcaacaacaatattttcctgaccttcctaagctgaaggctgaagtcgtgctcgaaagtgaagaagtaggaagttttgatgcacaaaatgagtcaagggatgaaaaattgaaatacctcattgctaaaaactcagaagatccattgagaaagaggcttccatcgttagctattcatgagattaccaaagcacagctggatggagaaaataaaccgattagcgttgcttcctatcaaaataagttcacatcagaagacaatgcctcttttggagagctaatggaagatgagagtcgattgagagctgaacagcataaacgacgatttggggtccattcacaacagccatctaactccattcaaactattggttactcaaattctgatgcaatcaagtcaattgcatggaaagagaaagacaagagtattaaaacttggaactaccagccaaagaatgccttaatgtatactccagaaactaaccattcttcatccctgtctcagataaaaaagcaaagcactgaaattcaagcggatgcaactggcttatcgcagtcttttttagaagcagccaatcaacctagtacggacccaatagtccccccgtctgtcaatgagactgatgcttctgtcaatggatatcctttagttgatgttaattttggacaagcagtgggatcctcttcgaaatcatacttcaacatcccagaacggcctcgacgagagagactacatgctatgagagtgcgcgatattcgttcccactccacgaataccaccattacatcagtggattctgcatcaactgctttaaattcttattctactcctaactctgtatccagaaaactgaccaatttaactcctgccgcccgacgtcttgtcgcacgttcgtatctcagatcacctttacatggttcttctccgtctgcttctcgtcacaccgccctaaggacttccattcccaaattctcatggactcctaccccgcgggtaaaatcgactgcccctacacctaaaagggtttaatgaaggacttgtctagtttatgtagtaattaactagagcaagcataatgataagtgcattgtacattctttaatttattgatgatttctagaaattatagtagcttttaaatggtatgaaatatatgaatttattaattaaccgaccgtgttaccaaccttgctcgtaatgtcaacattcgacactttagtgaaaaataaaacttcatttcgactgatgaatagttcaaatatcatcttttttggcaatttttatggatttatttttctcgtaatgccaaagggaagacattgcgaatagacgaatttcatataaaatgctttgctttggtaatgaataccactggtgtaaaagagaggagcggagaacaagaatgctaccatcctttaattttaaagaatgagaaattgcagggatttttaactcaacatcatttagttcccctacgatgataatcacaacaaaaccatatttaatagaggagaaattagattccatagacatgtagccgttagaaacgctttgaagagagaagttaggaaagacgccaaatcttaaagctgaaggagccaattcaagttttaataaagcctggtggaaatgtggtgcatgcgctttgattattccacttgcgaagcgaaacagaggtgcgcatgcttttacaaagcttccatattttagggacctcacactatcagaggttttcactaatgcatgtgactttttgtcaaacgtagagccaaaaacataggtatttttagagtctgcaatatcaaccttttgagcagataaaaactcttgaatagttgagtataggttctccgtaaaaacagatcctgaagaggaagaaagcttatataaaagcaaatttttatgcttatcaccaatttgataaccagaagcatcctcttccgacatagcatgattaaaagaaatctgatctattgtattttctgatggaagacttcgatcgagagattttgacaaacgtttcaaagaaacgtcttttaaaatttttctattctctttttgtttttgaacaatctctgctgccttttggagctttcgtgcttttaacttttcagctcgcacctctgaacgttttcgtttcggctgcttttctcccactgatgtttcagcagaaccaaaattctttacaatgctttctgttataatttcttcactctattaaagtataagccttctataagttataacaataataatattttcttaccattttcacttattcttctccacagaagcacgttttagaagggttcacgaattcctcctagtagttaatatgtacttaacagcaataatggaactaataaaggaaggagtgttttacgcctgcttttacagatgattgtaaaaatggaatttgaaaatactaaaataatcaaatctcgaaattcacgaacttggaaatgcaataacaatttctttctgccaaacttatagctacttaggatactcaggcagaagcagtaattgagcttactagtgcacaattcagtaaaattttatgctttgtaccaataaatgaatgcttaattaaatgtaaatttaagagaatctctcgttactacatcaagctatgactgccgccaactttaacatcgtagatgataccaaaccacttaggttcctaaggaaaattaaatataaaaaaaaaataataataataataataatctatactacttgaaatgttattgaaggcttggaaatttacatatttaagtaaagcctcatatacaaaagccactttattatgatcgatactgaactactcaattctccatttaagggcggcattttaatgaaattgtcagctacgcagtttgatatctgtttaacgatacattgaactgcaatgactctcttgtgaaactacagcatagcggtatgcattttgttaactaagaatattatatttattgttatagggatgtctaatagtatcagttaccgatttagctaataactgaactgaggaatgagacgcagctgtaattccatttataatcttcccaatctttgttcttaactgatgtctatattaaaaaagatgatcttacaaatacgaaactagtgacccgcaacgtactgtaacaattattacagtatgaaacataaggaaagctaagttggggtgaataaaaaggcagtgacagaataaatgtgtcagaagcaatccactgcctcgttcagttttttcgttcttctttttttatgccattgtttgaaggaattagttggaaatttgtttgaacgattttattattttgttaaaaagtctttgaagtggttggaattggactacagagcgaatattcttgattttgctgtttcgtttgtcgcaatcatagcaattaattcgcgcatgtgttttattaaataaagaatgatcttgatgaaatgaagaataattacacttctttgaaaagtcctctagatgaagaagatgaattgaagacagatcatgaaatcgatttggaaaaaggaccactcccagaatatgattcggaggaagagggcgcattacctccatattcaggtaagaattgtaaataataagaaaggaattactcaatggaaagttgaaacttgccatcttgtcaaattgcatgctttggtcattgtttacagtcggccatgcaatgcacacaatttgatacatgctctttctttactaaagtatttcaatcatattaatttaaacagatcacgcacttgtaaataatcctcctaacacacatagagaaaaccattcttctgggacgacagataattcttcccctttgttgataaaactgctaatatcattcacttcaatcattctattcaatgctccagcagtttgttatctaaagtataaggacgctttttttaaaaattatggtgcagtggaatggacattatttggattttggtgttttgtttgcactttggctttaatattcttgacttgtaagtgagacaatggggttattcttaccttcagtcactaactcatcagacttctatgaaacttggaccaaggcagttaaagtaactgtaatttccttggcacaatgtgtaaaagtgactgcagttttcttggcaaaatgtgtaaaggtaactgcggtcggcttgtacaactcaagggaaaaatgggtagtaataatttggctattatgggtagtcatttgctatacactttttcttcgcgccaaattcggtaatttgaacttagacaaggctctcatctgttctacatgcagtatttcagctgctttacttttatttttactatatggtatgtgaagttatggagttaccattactgaccgctaacacgcagttcgtcttccattttggacactcaagcatatgttttctggtttgtttcaagtactgggtgtacaaagttgtgtcgttattgtacagaaaggtttgatgcatttatttgataaacatatcgacgggacaggctacgaaattgaagcctcttcactctttgttataggaaattttcttttcttttacgaaatgggtttgtttaatattcctgtaatttactctaaccgtatcagaatgtccaggtgctctcaaaaggatgcccaaatttatcaggaatggtatagcttctttcctaggtatgtgtattcaaccaactgtatgaatgattttttacttacccgactaggaggtatagcaaatgcgattggaggtgccaacgataataatgacattcccttggaagaaacggaggccgaaagcgaagtctaattgctttattaatgtagttgtcgctacagttggaaaacctctttaccaaaatcaccaatgcagagaagctgcggcgttttttaaaaaattagcaccaactttctttaatcatcctctttcactataagtttatggaatatatgcttaacttattctttcaattaccaaagattttcaaccaatgcattctacgatgttggataatgtgcattgaggaccgaagtctttatttataatgtatgcgagtctaattatttgtcttttttaatggtactctacgctacaaacaataatggtttaacttgtttacgacaactttaaatcaactaatgaaatcggaaaactcgttgttccaccttgttaaattcacaatttcattgtcgttgttacattcatttctccttcatcttgattcttaatttaatcaagcttaataatcatttttcccttctgtttaatggttcaattcaaacaaaatttaatgtttacaaaataatgagcagcataatagaatattgtggtttagaacgatggtttgttatcgtaattacgtgtaagctacgcagtttggtatctgatttaaggatacgtagaactgcggtgagttttccttgtgatctattatattacaatacacaggttgtataagtagcaactgagtataggtattgtattaactgggttataatgttacctatcactagtatagctcataactgaacctcgttcctcagttcagtggtagctctatttatagtattcagataatatagatctgaatagattatcattaagattaatctccatatcgtatcatacatggtacgatatataattagaacatgtgacatatagtgatacgcaacgtagtgtatcactatatgtcatatgttgaaatactagttaagatccgcttgttgataatcacaggtaactattcgtctatgtacataaatacccgttgataacagccatttataaatagcgttacaactgaacctcgttcctcagttcagttatgagctatactagtgataggtaacattataacccagttaatacaatacctatactcagttgctacttatacaacctgtgtgttgcaatataatagatcacaaggaaaactcaccgcaattttacatttcgttaaagtggataccagatggatagttaactcgaatttcttcaaatacgacaatttttcactaaagtagtttagtgactgagtaaatagatcgtaaactcgtgtctgccctctaccacttcacttttacccattttattgtattgaatggcaattaacttaattcgcttcgaattgcatattttcaatacggcaagtttcaactaagaaggagaatttgaaatagatctgtaaagacgcgtatctataacttgcttattcattacgcgttattacgtttagtataagaaaaatacagtctgtcttttaggttttggctgttttcttttttcgttaaaaaacaaattgttctgaaaaaaaggaaatttatattgataggttgatgtatacgactttcgagaatgtatcagaatggtaaaccagatgcccccacaatcttaggccagaaaagagaacttgaagatgtagaaatacaagatgatgatattcaggtatgttaacgtgttgagcctttaggcattcgaatgttaagacatgtcgctaactctgttaaaggaagtctctaaagaagacttattaaaggatgtaagagtgaggagcattcaatttgatgagttagaaagtaaaatagagggacttcaaaatttagcagaagagaaattaaaagttttagctactttggtctcttggtggcctgaaatacttcagcagtttagcgttgtgtttcaaggcaatgagctgaaggacttcgagagtgaaggtgttttttcgattttggagaaattcccggagctttcatacttcaatgacgctgtgaaaaataataaaactaaagccttgagcatcattcaaaaactcttgtctactgttgactcaagcacaaattcggtctccagagatcctttttcagttttatcaattgatgactctgcccttactgagaaattaaacaccattaatttggatattgacaagattttagatgaattggataccactcggtctcagcttcattcaattataaaactaccagatcgctcgtctagttttactttgcaatgcattaatgaatcagtgagaccccagtctactaaagtgaaagaggaagcaaccacctcctctaaggggaaagatgaagaaaagaaagttagcacggttgaacaacgtactcaactgcaacaattatccaggcttcaagaccaacaaaatggtttaatggagtctcgctcacaaagccttaaaattttggattcgaacgttaatgaaatggataaattaattatggaacgagaaaacgcattaaacaacgtcgaaactacaaacttgaaaaaatactcttcctttttagcacttaaagaagctgtttctatgacatctgagcagttacgcgtattagagcacttattgtccgaatgttctcacgaaataaatgtattgtcgcaacagtcaaagaattttaacggtgtttttgaatcttcctatcagccgttaataaacgatcttgatcatcaaatatctgttatgcaaaacgatgaaaaaagaattaataacgcaaagactgaattaagcttatcccttgaaaagaagttggaagctaaaaagcaaaaagagaaggtctacaaagacaagttagatgaacttgcgaatttagagacaatggtattggaaaagaaaaaagcggtggctacccgtgaagctgcaaacaaaatccggctcgtagaccttaacgatttggagttacaaaaagatctgtcaacttacctttctaaagagttggcttctactgaaaaagcatttaggttggtaaaacagcaaactgtgaaaagtagccactcccattatcaagaattgataaccaaatttagtgtcgaaaaggaaaaggcggagcaaaaatattttctgaccatgaagtctacagatagtcttcatgctgaagtaaagttactgcgccagaagtaccagaagaccaacgaaattatctcaaaaatgttaaatagccaagacactgctgtccatagaataatagagtttgaagatcagctagcccgtctatcatcggttcgaaataactctataaaacaatcaacaacgtttcaagtcaaaaagtcatctcaaaaatcaactattcaaaacctggaagaaaaggtgtcttatttacagcaatttatggataaaaataatgctacattaacagaccttgaatttcaatgctcagatttatcatcttctatagatatactttccaagcaagatgaagagcatgaaaaagagaagcgaaagttaaaggatactggggtatcaacgtcagctgaagagttaaaaacttttagggccatgtgtaagtgttcagtttgtaacttcgagcgctggaaagatcgaattatttctctctgtggtcatggcttttgttaccaatgcatacaaaaacggattgaaacacggcaacgcagatgcccgatttgcggtcgtggatttggtgcttctgatgttattccgatacatctttgaagaatatgttttatttgtgtaaattatgtctttcaggaaaacgctgtatatataacaaatcattttccttaatataatctttgaaactaggtcacgtagtttttaaactatccaatgcatctatgtttttagttaataaatttattattataaaatcattactcgtcattataattaaaattctatattatacggttaaggattttttctcgcaccacccacagtgttgtcgaactgagttaaaaccgagccaatctttttctgatactgccgataaagatcgtcccttccgtttctttttgcatctttcattaatcgctggtaataaattcggaccatctgtttaacgtcaggcaaaagttcctttttgggggcagcaatgaagtgctcgataattttcttggcaccattttggtatattccaaagactctagaagatttaggaaattcaacgtcgccatgaatttccttaaccgtcttaagaatctgaatcattgctgacatatttttcagcatctgaagacagctgcctctattcattgattctattttgtaaaagatagagtatagcgatgaatcaaccagttcactcagaccttggaatacaaacctataaaaagttagcaaatcaatataaggaattcatttgttatttaccttcgttcccattcattcaaacaggtttcgagtttcaaattcgtcgtcacaatagtagagttgagagccattatcgaagcatctggtcttccgcggtactcgacaacatagtcaggaaggtttacactttgattaatactatgaatgtactgtaaccgaacttccattcggattagcagtaaagcatcgaattggagcctctgtaaagaatcaaagacttctttatatgcacttttataaaaatcagtataaagttcaatacatacagtaacataccccttcattaaatccgaattattacccaacaaattatcaattggtaaaaagtcaccaccgaaattagcttggttttgttgcaaaacgttcattcttcgcgaaccgttcataaatcttgaaaaacagcgctgaagaaaccattccatggagttatgaagataagaaaccgagttcactaggtcggaatctttggataaaaccgataccggaagtttaacttcggacgtaatcgcacgatcttcatattgtaataaacgcttattctccattcgacaaagctcatttaacccttcaagtgatggatttttttgcttgaggaatttaataaattgagggtacgttacatcgtcgtgaagtagctttactcgaacagtatcatcgacatcttcagtatcctcgttgacatgtttgtattctttgagaacagccgttctgcacaaatctataaagggtaagctggggaaacagtgaaaaaatggaaatgaaacataccagagagataatcagaacaatggttgcgaaaacgaacaagcaaagtatgtaataattcataaaattctaccaaatttaatgcaacaataggcaaataatcttgaagatcgtgaaaatattgaacaatagccacatggcactaaaattaacgttaatcgtagcttcttaatgagactataccttaaaaattgggattttagagtatatcttccaatctctgtgcaattggaacgcacccacgtctttcattatggtgtcaaagtgactcgacataaacttgtataattgtggaatgtaacttccccttaaaaattctttcataaaattaacagcaaactgaggaggtatatttgggctaaatttttgttagcaaaataatccaaactcaacttaattgacgtactttttcaaaatagacacactgtcttccaaaaagaatacggtttgaggtaggacagacgaagcatgaaaaaccgaaggcccaacaaatacaacgtggccagccaaacgtacaatttctttcgaacttccagaaaatagttcaatagtggaaactgaagcatttgatttattaagaataagctctggagccttttcgttaaccaactcatttattctggcataaaacgcattacttttgttctccacagcaatttcgtttgttacgtcgaaaagtttatcttcttcattttcgccagggaggttgtatatggacatctcagttccaacaacgaaatttccactattttcaatatactcttctttggaaataagataatcttttaacattaacctaatttcgctctcgaatgcttgcagcaacgtatcaaatggaaacgtgctatcagaagtatcaaattttgatacctttgggcttgtggggtccgagttaacagacataatgctagatttgtgagaagatgaagcatgctttggtgttttagtctctaatttggtcatgaattcggagataccgcgataatgcattaaaacacaccttaattttgtaaataagttcgtcaagaactcggaaatcatagtatgctctctatcagtctcagcgtgcaaacctatatcataaagtgattttgaaaagggattaacggtagaaacgttattaccgagtgaatatttgttaacgattgcacgtgaagtagaatctaccgtagtaaacatctccgcagaagtacgagactttaaagatgaaatagcattggggagttttcccaataaattcaatgactccaaaacaatacgtatatcacgtaaactgtctctaccataatccatttttaagcaatccgacaactttaaagaaagcgcttcttctaggtaacgcaattgctcactttggcccagagttgatgtatttgcattgttttttaaaaaatctctcaaaaaatatgggttggaagtttccctcagcggatttggagagcagtacgatactatgggataagcgacagcatctttaaggaaagtaattgaaaccaactcttcagatagaatgtcctctaaatgtgacaagagtcctgtcatccgacttttaaactgctccactactaatattccgtcaaaatcagaacgacttaattcatcccatacacgacgtattaaatcgctggcatgataatattgcttgctatcaacaagcgtatgaaagttgtcaaacagctggttggcttcattaagttccttgagcacacttatgacttttttgtattgagaactacgagccaatgtttgttgaagctctttgctattagtattaccaatgcattcttgcgaagcctcaagggattgctttaatgctatgattctcgaattgcacttctgaattccctccattatttctccataagccgatatacctcgagtaaagtcatctttatgagtatgggcaatcgtttgtaatgcagcactaattcgatcgtaaacgttcagaaaagacttataatctcttccaaagctactgtcatctaatagttccaacgctgtagatatcggttgatacttaaccattcgttagtaaattcaaacatcctccaatcttcacttattcacgcaacatacgtcttctcttcccaggtctttccattcatcctcaatttcatttactaaatctagcataaaggttaaatcaaaactccctgctgcttcaccttactttctaaatcgcctatgtgcattccacgcgatgcatactctgaactcaattcattgtccatgctagttccataatttgagtagccgttaggagattccaagcttttctttcccactggataccttccttttttcgtttccgaatagcctctggtatccatggaagtcaaatagtcagtagttttagcttgatatgtctattgactgtattatctttgaaaggagagctaagaaatcactatatgaattacgtggaccaacgcactgctatttattacagcgcaccttgatttaatactttatactgacaaggagcatgcaaaagaactctgtatgtgtttcagagttaatgggggtgatggactattgtataagaaaagaatgataagggtgtaactaagctactactaccacgaaataatactaatataaacagaaaaatcaagcatccaagaaaaggcaaattaagatacttcgcagaaaagtactttgataaataactatgccataataaaaaaataaggtatgatgagatgattaagagaataataatatgagcaatgccaaagaccaaaataaaagtcagaataaaggggtgcagatgtaacaaaaaaactaaaaaagaaagaacggttaaaaatgcgcaatctcaatatgcattttctccattacaaaaatcaacacatgacaatcttaaaagataagaaagtaaaagagagattaagggcattagaaggatacaagtattaaaaccagtaatccttgtaacacaaacaacacaacaaatgggggcggaaaaaaaatttataatccaagaagattccaactgtcatagcttcgttacaatcactgaattaagaaatttaacgaaacagaaagatgaaagactaacgacttctttatataacggattgccaatttgaagtaatataaataaatagcgggtctcaagcttccgagctcaatgaacaactcagtgcgcaaactatcgataaacacttttgccaagaaatattcaacaaagcgatgaatgtaagttctagagtgctttgaaactaaatgcatcaagcaacattttaaagctaccatttgaattattaggtagacgtctctccgcaagagtcatcatcatttgaataactcatcaatcccccaagttcatcgtaagcattagagagactgtcttcatagccccgttccgcaatttgcattcccttagcttccttccatatttttagaaagtatagcctcaaagtccgtaaacctcgtacgtatcctcgatcatacgtgtctttgtgttgaggaggacatgtagcttttgctaaaagctctttatcctcagcaaaaacacaattggcaaaatcaacaatccgaatgtcaatttcacgaggcttgactttttctttgctggatttgtcgcttggcggcggctccccatcatataaaaatagtaatgaactagcatacaagcgggatcctttaagaaacctaacaatttgctctaactgctctagctttctaattatcgtgggaatatgatgcaccaagagatggctattgtcttcatcgtcatccgttttccctaagtaacgcatcaatgcgtgttgaaattcctctcctgctttaatatcacgacctacatacttatcttcaaatgtatatgattgaagccaaggatgccaaacttgcattccacatattcggacaccaagaactcgagatgtagtcatcgcacactttttagtttgtgaggctttctttttctccgtagccattattccgtattgtctagtacccatcttgacatccaacacacaaggtcttttcattccactcgttaagtcttcaatcacaatatatctctcaatctgggtagaatgttgagattccgaattttccgcgagggcattagcatcattattattattgttttgattatcgcttgctggaatccggtgatcttcatcggcggatgccatgtgtggaagagagagtactcgcctaggatcatttacgctcctgaatggatctccaatttctgctggttctagaggtggaggtaactcgctgttttcttcattgtccatagcaaaaatagagtcatcgggtacagttccatgcgagttcggtgtacttcgtagttcctttattgtatgtcctgttgactcccttgaatcataatcctccattgtaccagaaacccgaggaaactcgttagattctggttcttcccaaacagcatctgatgaaaagcgtctatatgacttaccttgattattggacggtacgttgaggagttcctcgtcgacttcttcattttcttcggcaacggcggaatgcaagtcgtaatgtttatcttcaacgctacaggataagcttttgttaggatctgcatccttatcacgagctcggctagatgtgtttccattatccaattgtccaaaagcaaccgaattatcacgaaaaacagaaggtcgatgggaactccttgaatggaaacgagttccaagtcgacgtcttgcatgcttgggagcaaaaacttctcgtagaacttcctctcgcagttttctgttaattaatgtggttccccatggagttttgggcggtatatcagccacgaaagtaggagatactggccgttctccggctgaagatgatttatggtgtaaagatttggggcttccataagaatgagatcttttgtcgggaagcatccattcaggaaaaatatgacggttttgctcaacactaacctctggaatgtatccatagtcttttttctgataacagctgttaaatgtgtgtttatggggggcaggtgttttagacgatgattctgtattgacatattccgtagtagaatcgttttcttctgttttagtaatagtatgagtcacatttaaaacaccaatatactttgggataaagggaagcaattctggatggcaagcttcaatagtttcataaaacgtattttcatttcttgtaagtggtttgcaaacggctcttttagaaaaccggaagaaagccgtatgtccaccgacttgatgtttgaagggttccaatcgtacagtaaccggataatcaacattccaatggaaaaaaggatggtcttcaggaggagatgatgagacagatgatacagatgatcgcggggtggatgcaggactttgataagaacgggataccgacctttcaagctcaaacgaagcatcaggtagtaaagggaggtgttgagatgactttttagaaggattatgtggtatgtaggtggctgtggttttagaactaccactatcttttcttcgtttaggagctgagctccgaccacgagatgatcttcgacttagtgatgtatctttttcggaaataacttcatctaaatcatgctgagcaccaacacttggtgatccagatttggagagcctttcagaaacagattcaagaggactcgacacgttgtgcaaagcagtattagtactgttaccggtttctaagttattggaggtagaagactcaaagagacgtaatgacctgcttgcctttcgagacggatgagcagaatgagcacttgccatatcatcagcttcagaaacggctgaagactgcagcaccggtactggtgattcagcaactgaataagaggaaccacctaattgcaagtcagctagactcttgtgaattgaatcactcatatattcaacaggggtgtgtgttctcaaaggggtttgttcttgtgaattacttcttgttaaaattaagcgagggacatcttccaagctcgtagttcgagggtctacagcagatgaatagttacttagccttctaggcgataaactgtctaatgacttaggacctatggattcagaatgcatagtaaaattattgttatcttctgattcatcgtacaagcattttaacgtttcaggacctcgatcatgaaaattcacgtctctgcctttacgtgaattcggcaggtaacactttggtgcgttctgcataaattcataagtttatctctattaaattaatatttttccttaattccccttcaattcctccaatttgtccgatttttattagtttacctttcgcagagacccgctttggttcttggcaagtttcttactttgctctagcttacagtataatgaggcgtatagtgaaactacttaaattcattattgtcagcaatactacactacgctatgatacactacgttgcgtatcactatatgtcatatgttggaatactagctaagatccgtttattgataatcacgggtaactatccgtctatatacgtagatacccgttgataacaactatttagaaatattataaatagcgttacaactgaactgaggaacgaggttcagttatgagctatattagtgataggtaacattataacccagttaatacaatacctatactcagttgctacttatacaacctgcgtattgtaatataatagatcacaaggaaaactcaccgcagttctacgtatccttaaatcagataccaaactgcgtagcttacaattattctactctaaagatccacataataatacaccgtatctgtcattaaattacgcattgtgtcagctatgcaatcattaaaacacttaatgatactttagaactgcggtgggttttcctaatataaaaaataatgttaaataaaattctgttttctatacaataataaatatatcaaaatattaagagatatcgtatagtattatatgtgcactaaaatagtttacaatcagctgaggagtacaaatcaaacttcatcaatatttttctaattaaagaataagtactttagaagcaacgtatgttcacggccgaaagaaatgttggtaaaacacaattataggtatagtgattgttaacgtatcgtaagtataacgcactagacgttaattatatatttgtgcagtacaatggatacccttctcttaaatttcagaagcagagatcagaaatttaacaccaatgtttacctcaaaaatatgccgtctatagtaataggcaatattacttcgaagagtattgtttttggggaaaaggaaaaagctagcgatgccgcccgtacgtgctgaaaaaaagcggaaaactgatttgattgaacaagtttgcgttacaaataaagcaggggaattagtagatttagaggacgttctagaatatggcccttattcattaacaggaattttatcttctgaaaaggatgagcaagaaccattgtttgatgagagcattgttctgggatactcgataaaaatatcgcctgtttggacatacaatctaaaagacgttcctgagaaagaaactatgagcatatggatcgttacacctcaaagaagatacggaattttgtctccttcttctgagtataaagccatttacgaacagatcagcgagaagaatcgattgttttaccttattaagacaaaattcaaagatgatatgatatctggtacgttagaagattacgataattatatcgaagttttaaaggaaaagctagagcttccttcttgttttcaagcaattctcttagtgcaaaaacatattcgctttctgttaacccaaatggttgcgacttcttcattacatgtatggtctgaatcacctttttttataagaattcgatcttcatacgaacatctgattttacaaattaataaaaacatttacaatgctcgtcaagagcgaaagaaatcaaagttatcgtcaaacaatccatcggacaataatactactatgaaaagctctttaaaccaagctcttactttaattaatttacccgagcaaccgtttagcatttcctctcccacagcaacaccacaactaggagttgtaaaaagaacttctccattacggtttcctttgaatgatatttggctttccggtttaaggattgttgatccaaatattgaatcgatatcattatggaaaagaatacaagtttcaacctctccgaagcatcaacgttatattagccttcaagaagtttgcagcgttattgctcaacagctacaaataacaaatttggaagctttgaataaactttcttcccacggcgaaacccttttgcaaattatgcatactgctttcacgtggagaggtactaagctttttaatgatattaagcacgcaattggttttagatcttctgttcaacaagcacgatctcaattccgtggatattgttatgattatttattcatgcattgtaacaatggagaaaaaacaagtctacatctcttgaggactctaatatgcatgaaactagatttctcaaatgctcaattggcggccaagatattatttcatttcttgttatttgatattggatcaggcctttctggctcagattatacatatgaacaatacattaatcactcagctgtcgctttcagttttacggaggaaatttttgaaaaaaattttgttacagttcttcctgactttgttaaacttttttctatttcttttggttattggcctgcattcagcttctatgatgaattattgaaattacttcgcaacaaatatcccaaagtatattcatcaactccaaatttatgcgatcaggtatggctggatcgaacaaatttattcccttgtaataggtcaacgaggtcgactttaccgtatagacctacaaaactgctcgatttagcttccgcatcttcctgcttatccaaaaaggaaacagattttaaacaagacactggattatattcatataacttggagaaagttgaggctttaaaagttagtccggatttacagactggtatttggtcatgtccagtacaaaattgtttgtattttgctgtttgtgacaacccgtataaaccttctcaggtcatttacgatcatcttttaggacatgtagattccaagtttatatttaaaactccttcgaacagtgtccgatcgtttacaaataaacttgaacacataatgtacaacataaattaatgatagatatgatgatttttactagtaattaacaaaagacacactgcattaaagttaatatatagtatgtttataaaggattacaattttacatggctaatgtcaaatacactttactttacaaatatcatgtgttcataaacaatttcaaaaacacattttgtaacaacaatttgatacgcttataaatgtgcctattaaagtgtacaaatagctgaattatttgtcaaatgtaatataggacgatcaaacaaaatcaaacaccaaccctttacaattgtaaagttaatggccgttcaaaataccagaacccatttttgataataactgagaccaagcgataaaataaaaacagaggaatgtaaacgccaagaactactaaatgttcatgcgtaaggaaaacgagcaaaaaacgagtatttattttagaaaagagcaatactattaaaaaattgttccagaaaatacggaccatacgcgacgattacccatctttttggttttgtaaacgtaaatagaatcatctaatcatgaatcagtaggagcaaacatgagtatgatgaggctcacttctttgacataaaaaaattaatgtgataggataatatcctaaattcgatcccactcatagatagaagaaagtgtaatttcaactctaatacaagaatggagccaaagtaaacaaaggaatgtacaaataggcaagatcctgtgaaagaaaagtacctgtaaaataaggattttatgatataaaaggacaaggttgacaaattaaatcaaatcataaaaaaattaaaaaataaaacaacattttcatttttttttaagaaacacgcagtattttggcttaataaatctttttcttttcatcaacggaaaacttgcccggtccagtgttgacgagatataggagaccaccaacaatagacaaggtttggaaaaagtcgtaacgataaaagtcacgatagggactttcacgaggaaccgaccagaagctgttgataatgaaattggcaacagatagaataagaacgaggactgcagcgaagaatttagccttaaaaccaatgaccaccatggcacaggctgtaacagacaaaatatgaactagaattcgagtccaagaaatcccacttccttccttagccaaaagacccaaaaacataaagatcaaaagaacacgcccagctagttggaaataagtacgtttattgtgttcggagacggccggtaaacctgcaaatctattgatacgacgatgaataaaggtgtcactggcaacaaggcataatccaccgatcacgctcatgttacgaaagaacatttcaccactggtgatgagcccatatgcaaacgcttgtaaaagtgtaacaaacaaaagagagccgatggcatatgcctgacgctttttaaacacgaccaatgtcgaaccaaccaacatcagtacaacacaaacaaacagcagcaacggagcagtcccaaaacgaaatctgcggtagtcccgcatataagatacttgttcaggccattgagtaacgatccgaatagcgtcttcgaaataagtagcgacaattaggaatcgacccaagagcggcatatacggagtaaatggtgccatgaacgtttcagcttgctccataaactgacatgctcgctctgaaaatgtcttttttctgatacccacagtagtccttgtttgatatgaatcctggttcatagaaagcgggattgtcgaaaacggcgaacgtgaagtcatcttttcagctcgtattaattcggggtttttttggtgtctataaatatttaatccttaaacttcaaatatctcttagaaataacttgataaggccaacttccagtttcctcaattcaacctcttgtatggagaagcgcaagtttgtctcttcctttgttgctccttatggcctgttggcatgcagtcgtcatccagggcaaaccagaatttcctaaaaggacagcattacaatttgatgaatttgggataatttaaataattctatgatccttattttttttatttttattgagattcctgaatattcttcaacctctacactgattttttattttaaggctcgctattaagcgcaaattggtttagtgtagtctaagaaattattacctcttgcagtgagttaaagaatgggatatttaggagagccaaagacttatgaaagctgctttgtaatgatttttaaagcttgaaaatataggtttaaattttagaaactatatttggatggcgttcggatgtagtttgaaaattaacatgagtcgttaattgatcacatttattgatgaaaagcaaaaataaattaataaaaggccccatttccatatcacaaatgaatactttcaagttagtgtcataattaaatgaatttagtggaagttaagttttatgtgtgtgatatttacacttgacattacaaaagctattactttcttagcaagagtcgttgtaatgaacatttgtaaaaactttatacaaacaaaattttaaagaagggtatcgtatataggtcaaatacgtgagttaagttcaaatctcaatatagtcatttgacggcgaaaacaaacttattatccgtggaaattttggtaaatcctttatagcaacatcaatgtgaatattagcttattattaaatttattttatttttatttttttcttattttttttggcgggatattgtattattaaataatcataacaattataagtgcacttttatttttattttaaggcatttagaaaagccgactgaacccgccggagtagcaattttcacacataaaaaaaaaaaagataaaaaaatttatgaattcgtcttgtatttaaattaatggttcatcttcttaaaaaaaaacttcattatatgtgacaatgtagtacaattgctggaagtgtgatttgagcaaatgcacattagcaataaagtgtaaagttaccgaagcgaagtcttttcgttacaaaaattgtttagtagcatatagctgaaataaaaaaaaaaagacgaaagcagaaagagaaaattacatatttcttgggaaaatataattaaaatttattttcacatccttacgaattttcgttgcttcgcccgactctatgcctacttttcaacatatgctgaataactgatgatttgacgactaattggatgttttaataaaacatatctatggtttttctcttcagtatgatgactttacttcaactacttactcgcaatctctcggcacttttttgaaaagcacaataacaatcctgtgtctcgaaattccagaaggaaaactatgttttcgatattgcatattttagttgaagcaaatcttgccacatccatatttgatgagacactacatgttaaaccaaatgtttctttgaatatcaaagaacattaaatttaacatgtacatgcatgaaagaaccattcttactcttcaattccattcgcacactattgaattacttacccactgtagactaacttatcacagctgagttttctactctttcaccaactacctagctaattttcaactacacacgacctttttacaattgttgtcatagcatgaaatcctttttatttattacaaaacataaacagggattttttagtgagccaaacgagagctttggatgacagaggtaagctcttcaatctttcccttggcacgcttaagggtaccgagctaaaaagttgttagaataagaataaattcaataacaaaacataatatcccattacagtattcatagctccgagtctcaaaataccacaagtgaatttgagtatactaagctttgaagctctctacgagcatgtacagtaacagaacaaaattttacataccctcttcttggccaatttgcgggcacgcttgtcttgggagttacggatcaattccatgacacgacgctcatagggagcgaatccagcaacctcacgaacgatagaacggacaaaagaagtacgcttggacaattgtcccttacggcgagaaggacgctcaggaagttgacgcttggtcaaaacctttcctttgtttaaaccaacaaccagaccaggtgccattgtgagattggtgtaggggaaaacttactgcgctatagtacagactatcactgcccttaacgaaaataacggtcacaaaactcaaccctaacctacatccctttaaccaaaaaaatcgcacgaaataacgattcctacctctgtatggcttatcaatttttagcgtaagtaaaggaggcaatactacaggttctcattgtattgtaaacaatggaaattgcttccatctgcgggtttcaaagggtaaagtcgagaacggttattacatagtactgaaacactacataataaaacgtattatgccataaattataacgaacggttcgttttttttgaaattagagttgcccctacgagtaaatgtatgtcattcagtctcccagcaatgccatgccctcgtacgcagcagacgaaaggctacagacaagaacatgggtaatcccttgcactcaaattgattagtaatgtattttataagcagcaatgaaacagcagtcatacaaatccttgagcatcccgaaatatcacagtatccacgctccttcaattcccgcattttctaccgtatttagaaatgactgataacgcattccaccgcatctcgtaatatcttttctttagaagaggtattgtctttctttcatcgttttgctgtctatgatctcaagaatggcgattttcagagatagacgttatgggtgctaattgtgccatgatcgtactcatcttgtaaatccctgacggtgagaaaacgagttctccgtttcagcaacatcggtggtgtatgagataatggataaccagtcccaaccaaatatttacagaaccctcagacgaattcgctggaaagtaacattcccatcatcagaaggaagactcctcttgttatgaaaatttcactagcaagtgacatcgatagctcctagcgttccttatttcacatccgagagatccttactatattagtcgggaaccctttactgcttgacatttaccgctcttgaaactcgttactaaaccggatatacggaagcttaacacgttcgatattaaacaatatcgtttttgaagggatcaactttattattggcttacataacgttatctagagtggagtaactcgttataggggtcagccaacacaaagcgtgggcctttgtataacctgtcctttgccatgtttctgttaaattcattaagtaggattactcgagggaatcgatccaaaaggcatcaaaacctttcagatgcaagtagctcttctggttctttctccaagaaaagttctacatcgcaattggtgcgtacggggtcgccgagtgtagagcctacagctttgtatttgcagcagccatttgttcggactcatttggtaaagggtaatttttccacgatcgtttctttgccaaggttcgtggacctagatgaatgggttgctttaaatggtatgttgctttgttttttgcagtttcgcgtcagcagaagaatgatggaggtattggttactggacaagtgtttttaaatttgaccaaagcactgtctttatcatcattttcctttgagggaagattcttgacggattactttgctaggtttctttgaattgcatgacatgaataggaggaaattgaagtgaacgttcgatggtactaggaaattatactttgagataattagaaacccaggaatctagcttcaaattttaaaaaccataaatttcaatctttttattattattattatttttgttttttcatcgttcaacaaaaatttcttctttttttccggatacgtaatccgttctgtcaacaacttgtcttgtgctaaccgttacaactctttgcttttcttcacgtttttttttgtttctttatatattttctaactcttttcattttagtctacgagttgtttacttacctcaatcatttttacgacgtgtttgctacattttgcactgtaaagacttgtcctgttatgagtgctgcagccaagtatgtgattctctagttaattattttctcacctctacctttactaacttactcttttattatagtttcgactatacttggttggataacaaccgtaaacccgtccatttacccgctccccaatatattgaatacgtactcgcttggattgaaaatagattgcatgatcaaaacgtctttcctacaaaggcaggcttgccatttccttcaaattttcttgttattgttaaagccatatataaacaaatgtttcgcatttttgcccatatgtattatgctcattatgcagaaatccttcatctctctttagaagcccactggaattcattctttgctcactttattgcttttggtaaagagtttcaactgttggataaacgtgacactgctccgttaaaagatcttattgttgtcttagaaaatcaaggaaatatttaatattcttgccgaaggcaggacacacttctgttttctaccatttatctcttttgttttcgtcctttcctttaccccctcttcccacaaataccctcttccctcgaatcctctctctgctacacaggcagtaagttatatgctaaattcctacacttccttttgttcgtttttcgttaccaccttcattagctaattactatttgtatttcttgatgccattttctttatttttacatcctattccttttggactcttggcatattcgcttgcattcactgatttcacgggaatttttaaacagactttggccgtattccttagaaattatcttcaacgtccgtttagtttcttaactatatcttgcattttatgtgactcattccacattattccttgataattataagagatcttatccttctcaacaaaaataatccgctaatgctctcctttcctatatctaaccatcaacttctttttttaaagtccacagccttgctccccttcttaaccttggacttgaccgataagcaaattaaaaaaaagtaaaacttgttacaactgaaatttgtttttgttttaatgtccactttttttatagcagcaatttactcaaatgaactgaagacgtttccaaattcgacacttttaatttttcccttcagtcttttgttgggttattgggcttactgataaataattcaaaaaattgtttgtggacgaacagtgattataattatttcctaaattgaacgttacattctcaaaggatcgagttatggtctgactctctttttatactttacgataattcaatttttgggcatactaatggatatcctttaaactgaaataaatctcaatgtaaattttgtttatttctcttttaagattgcattggcttgatccttcactagactagactgtgtacgtatcattgctaacttcaatccaagcagataaaaaagtctctagcttattcgtaaacatatagtcacgtcaaataattaactacttaaaacatgtgccgtgtagtaagataaattgcagtagagtgagtcgattggcaacataaaacgaagaacattattgaaacgagggaagggaaataatcaaaattaaaatctaaaagacaaatacttgatcctcaagcttcgaaatggctcgggacttttcatatcccaatgcaactgtagcttctctgagtgaattaaccatgggagtagggccacaaataagaactttggtttcaggagaaggagcagggaaatgcgccttgataagttcttgagtaacaaatccaacacttcccttccagttttcaggaggattgttcaaaacataatgaacggtaaaacgaggatccttcttagcaagtgcgtcaatctcatcacgaagaacaatatcaccctctgatacattagcatataaaagagtgatttccgttggatcttcaaaattagaaagaacagcacgaatgatttgaagcataggagtaatacctgttccgcctgcgatcatgccaaaatggcgcgcgaggccagtgcgatgcttccaatttcccttagggccacgaacaccgatggtatcaccaatcttaagttcagaaaacttcttactcactttgccattggggtaagactttacgagcaaatcaaaataacctttgtcagcatcggaagacagaggagtgtaagatctggaatactccttaccatcaacatcaacaaagacctttaaatgttgtcctatggggagaccaagaacatcgttagcgcgaggcagacggaaacgataaatggcagtgttgtggttcaatacagctttatcactaagttcaaattgttgaattttatcactcaatactttacgaacgcgtccacgccagaacttatgaaaaccaagagagaatgccacaacaatagcgtaacccacccattcgcgtttcacaatgtaagtaccaaagatgatcaaaaacactggaatatagactccatgcaacggggtactaagaagagtttgtttggccatttcaattaggattgtgagccaaaataactaaagaaaaagtagagaagcctgaaagcagaagaaatgcgaaacgtttccagaagactcaaattacaaaatcttcaagaaactaaaataatttaaagaataagaaacctttcaatagtttcaaaaaatttaaaagaaatctctagttttcacgattcctgcagtattgctaacagtagaagtttggtcaagggcaagtctataaaactaatcagatttctcgaatgattttttaaggtcatgaacaactaagcatggaatactgacgaaagagaacataaatcatcacataatccatttcattgtaaattatatagattgagggctttcgcttcaaaatctgctaaaattatttattttgaaaaaccagcttgtcgaaccatacttgttcgcaagcatatgcttgtttatcacgccgattcataatttaagaaatgaattaaattttaataactaaattttgtaaattcgttaataaatagtctttcagcaatgatctactaccggaatacatgagatatatccatctatttatatataattcggtatacagtttggaagtgaaacaccgtctctgaggaacaagcattaaaagacaggtaattgtttccaagtaagaagaagcaatttaaaaaccctagatccatcaacttgcattacttaacatcacattttttagtaaaggaccagtgtaggcactaaaaggaagaaccccaatagcatccaatgtttcctcaggttttcaaaatttttgttagcgaaagatacaggagcagtataaagccctgcattggggtctcctgttgatgatcctccattcgaagccttaaagacttgaagcgattttaaaagtaagggagcttgaatagcttccaatgcagacatttgctctccaaggccataaagtcctattataaagttagaaccaatactgtttttttttaacagtcaaacataccatcccaagtatcgttattccaccaccattgaacaccacaagtcactccatcataaccgccgcaacatgccccggctgcagctttggcggtggatatcaacaatggttctaataacggtgcagtgaatggagccatttgtgccgtgtagaccataaatctggtcaaaaagcctttgaaagacgtttgatcatagttacatgaaagagctatttcacatactggttcgaacataatatccttgaaaaaaaaggttttggcagttttgttggcaaaaccttcaactcgagttttccataccgtagagttcgtctggtgaaactgttagttacaatcattttgcattttacagtaaagttataatgtatatatcctttaaacgtacatagttatacatgtaagctgctcctgccatgtataatcctatattgtaagtccactgagtaatttcgatagatgagcaattatcttttatagaactcccatcaaatacagtgtaatcttcttgaataaacccaatcctttggctccaatcgtatgctacattagcccactcagcataagtatcgttatcggtgaatcgagccagtcgagctgcaagctgaaaaaatgctccatttgagacagtgttcttatagttgtacccagagttaaattcagtaatctgccatcgaagaccaccgttgcaatgatccgtgtcccatcgtgtgacctgttggttgaatacagcttgagccagttccaaccattgtggttcatcggctgctggatttgaaaagtttgcttcagcggcagatataacggtcagaccccaaaatgcctgatcgtcatttccctcagatgttgtataattcgaaggcatataatctgaatcctctccagattggtacaacatgctggtctttaccaactcgttatatgtactattaccagtggcaatgtatctatttaaaagtccctaaagccattgttgttaataaattatacttttaagctcaacgtacattccaagcagccccggcttcccaccagtaggctggaggaaggaacatcccgatagttcctcctttgtgctgaccagcataataattcaataatccatcagctactaaagaagtggctaagtcaacggaggacgtgtcattcaaatccaccgaaatggcttcagcgaaggaaaacaaaatagttgcaagtgaaataaagattgtaagactcattgaaaaagaaggattaaatagagtagtatctttgaagattcccatatgtatccagatgactgtcgcccttcatatgattcaatgatgactcattaatgactgatagaaataatctaaacagtaaacaacgaacgaccaaaggtagggaaaaaatataacttaacgcaatctatcttctataaaattcttaagcctttcaatgaaaatactctcacatttattcgtgagaccgacagccccatgcatatcacaatgagcaagaaggaaaaccttagaaaaaatacatcaaaaaggtattatttaaattgtgtctttttgttttaaccgcaattttaactgtttgaatataacagtttgtacatggtatcccagtactttctagcggtggacttatttcctcgttcgtttagagtatgttcttgccttttcttttttaccttcctttccctcaattttcggtttttttaaactggatattgtctccttaactgagcgtaaagtttcatcgtgaagttcgaacttttcatatagagagagacaaaaggacttcaactacaaataaaattagtaatttattcttcttaaagtttatttttctctactatataaagaatcactgtacatgcctttataatgtcctctctcatttctaaatcaacttgataccgtgtaaggccttcaggatttacggtcttattacctagttggtagcttcactggggttagtaactaagatgaaatcatgaacttacgcttgtaatttgtccattgaaaaagtatacatatctctacatgattttgttaaaatttggtcaaccaagtacgactagacatacctaatatcatcaagatatataggtgtagaattatacaccttcccaatcacttcattgcatctagtacaactcaactctgaatagacgctataatttttgtattagtaaactggcgagcaacacatgcaacataccaaagaccatcatcactccttttaaacgtatcctcaacgcgtacactattttctactgcatctaaatgaaataattaattacatggacatttcttttaccacataccactcaaagtgaaactaagatattctcgatgagaaataacccaagcattagaatcaccaactatttgaaaacattttttacattggaagacgctaggttgtgactcttttttaaaatcaatatagcccgaatgactagtttccgtctgggacatacttatggaaagttcattttatctagtagtagtcgttattaattaggtgcgcttaacattctatatatggtgaaccaatatatatcagatgtagaagcaaaaattaaatatattacaaaattataaaaaaataaattactcatagtcctttaactgttttcggaagaaggaataaagacgccttcctgcttcggggccaattagttctgaccattttctttctgaggtttcggaagcttcttgaatatctttcacgcctccataaaacacatttctgtagtttttcatagttatgtatgggagtcccattagcaggtcgagtggagcttgattataagtattcgttgagtcttgcccagcttccaaacctatagaggcagctgaagcaggatctggttcttgttccatggctttcaaatcttgaaaaataattgatgtaacgtaggcactagaagaccaaacaatccttaagttgggaaacgataatgttaacagtaccagtttagattgaacatcattttttccaatttcgcttgaaaggtcggagaaaggctaaaagctgtcagacatagattgttttagtcagacttactggagatgtaaaagattggtgttgttcgaattcaattaacaaaactggaatttcataatattcagtcatagcttcacattgggaataaagacggccattgcttaatgattggatcaaatctctaattgacttcctttcaacacagatctttggtgataatatataatctcccactaagagttggcaagggataacagaaaaattatttccatgtaatatggaaggtaacgaactacggaattccctcaagtcaacgataacctttaacgttttaatacatataaacataagatataatgaacgtaccctaggtttctcatttgtgatcgataactgtcctcctccagctatacgagtattgacatttcttaaaaactttgactcttggctttcgaacctttcggaatcagccgtcagtacgatagccatattctttttagattagcaagttttgaaaagtttagaataacttacagatcgttctttaataagacgagagaatgaatctttctctctccttacagaaaaaagatatttttgctcctcaatcgatcctccatagtacataaaataaacccttagagatcttttgggatatgtagctttgtaaacctcgactcttcgaataaaattgggatcagaatcgaacataataacgtaccgaggtcttaaattatttaatactaactcatctctttcaccattgtaggaatagatatagatggaattgaaatcatcaataacttcaaatgcatcattgcccacttcaggttcataacgtttggataagtgtgagagcagactagacttattagcgtgtaaaacctaataattagcgtacattttctctaggcgtaaatccctactaaaagaatcattcgcatctgtattatcagaagttgtgcgtgaagtggcattgtttccacctcttacccttcttctctttgaaggtggaacaccttttctagacgttgtattagaagcctctcgctccttggaaggctctggtttcttgattgatttactcatctttctatattgttctctccattgaaaatagtccactaatttgctattcatatttttcaaagagtctttattgtcgtaagtcaccgtactcaaataatcacgtaactgtaaacaagtacgctcatctgcgcacataatcattatcgaattattggatgtttctgaaagatttgttaatatttcttcctttaaagagagttttttttatacctgcatctgtatctgctaacattgtttcatgacacacttcgtttaatacgtcttgcaagacagaccatttcggctgttcctccaaaatgggaatcgcatccatattcggtccttctgattctttgtatactcggtctctagcgacacggatcattttattggcggcatccaacataagccaaggagaaggttgtgcattagatgggtagctggaaacatttacagataaaacgagggtatctaagagtttaaggaagctaacacagtcataacaaacaagagcacttgtttagttagagattatttatatcgaaaaaggaaagaaaagacgaacctgagaagaaacttaagagtcgagagatctccaaccaactgtttggtttttgggctaactctgtgccatacagaatctagttgtcttcgcactataacgtcaaaactacgatgtaaggcagactcgatattccaatcctccatatccagataagcagaatttagtcttcgtaattctctcattgtactttctatacaggttaataggcatgactgaattgttttttgggaatcacttaggttaacgttcaactctaccacatttgcagggcttttttcaagggactctgccacaactacatgaaatctgggatatataaatacatgtcgaagaaacaggcatcttaggcaatgactgagagcatttattcccatcaaaaattgctctggatcatcactaaaagctttaatgaacccagttttattggtttcacgatacaatcgcattatgaacgctaccgttccagtagagacaactctgtaagaaccatatgtaagaaattatttccttagaaatcgcttacctatctgcatgtaataatacaattccagtgattttttctgttggaataatttttgtcaacaaatccatcactaatatgcggcttgtaatggcgaaaataccaccctctagataagacttttctctaaaattattaataaatcaggtcctgtgcaaatatatgttaccaaagcttaccgtttgtcaaccgacatagtttctgtatttacagtaatcaattttttttccaagtggctttccatttcatgttgaatcaattcaatgtcatcaacgtttgctccaacaagcaaaagaagggatcctggaactgcaaaatatgagagtacatttgctgcaatttgtagcaatgacaaacctggtgcaattacacacagaccatcctcttcaataagttcgttaaaaacctgctgctggtaagcaagaggcaaatgaacctttgtttccatatttaatggtggtgttattcgtagagattttccaatttgcaattttgatttctgaaagctgttaaatactttgatgcgaaaattttccaatttggatggaataatcaactctatttctatttccgttcacaaatgtgttaaataaaaaacagtagcatgagatagactccttcttaggaatttaggcggatcgtgaagttaagagactctcaaggatgatgaaaggaagaatctgtacaaaacaaaaatcctatataagacaatgaatttaaaaatgattaccaactgataaaagtatccaaggagaaccaaatacaaatatttaacctaaagatgaaagagtgaatggaatacagcaatcagtaaaaatgagcaaccaactatacataccaactagaggttaaactagtttcaatatattgggtaaaataaattacttaatatactctttaaccattgctcagtttcgggcatagttcatgccttagcttaattctccttaattagatactctacattcaatctttccatgtattcacgttggggtatcccatcgcttgtatttggacaaccatattttttaaattttctttcaaaatgtaagatttatttgctgtcggtttctaacttcattacatgcgtataaccattgctcatcctaaaaacaattatcccagtattaagtatatcaaattataaagcaataccagaaaaataatgccagctattaatactatcactgttaaatcgagtaaatggcgaaaaaatacacttaaaaaaaataaaaataaatatacacataaataattttctctttcatttggcattactaaagaattttcgttttttggttttctgctaagtcaatattattggtcgaagagcgcaaaaacataaacattatagaaaaagtataacattatgtaaatttcaattatgcttttttttttttcttttttggaatggaaataatggcttttcttaatttatgtacgctctaaattatctgacttattacattctattgtagatgactgtttaacagacatttgaaagagtaccttactagtaatcaagaattgtggattccaagccttaaccccaatagttatttacataaaaaaagaaatattgtaaataaaaagagctaactcgcctattcgccaatcaataaaattttttatcgtcttttatttctcggttttccgatattatctttagtacaaaagcaataaaaattcagcaacaatcaaaatgtaagcggtgttgaaaaaattacttatataccagtgttgattatttttccgagttttactggttaagttgaaggtccagtgtagggaaccataattaaattttaaataactgaaataaaaaatgaatattacttctaagatttataaattgcacagaattcaggttgctttaccgacttaactggcaaattcattgctttttaataaaccccatatgacttgtataaataatcataaagaggttaactataataatgtaaattatatctagtagtgaactaatatcatatgcataatatatattgctatataaagtaatttatgtcgtttacttgcctcattaaaactcttcgtgtacatatcacaacacccagtttttgatgtctagaagaacacgatcaaggtcgcctccaaggcgatcctacaatagagaaagaagagattaccgaaaatatgatgactctgaagatcaaaagggtgcacggtataaccgatacgtagacgatgtatcaagtcgacgagataggcatgattcttttcgttctcacgagtctaataaaattagaagagataattcttggaagcatgataagtatagttacgaaaaaaggtatcaagagcgagatcgagagtatgcgagatcaaagaatattcccgatcagtatattggtaggtcaccgcgaccaacatctcatagacatgctgaggaaaaagaagtagacaataaaactaaatcagatgaaacaaatcctgtattacaaggttccgcaactgaaataaagcctcagcctagacgttctcgatttgatcgaactgagagagttggtgcttctttaagtgtttcagaaattcaatctgaaaatccacgagttgatgtaattcccaaggataaagctgttgaaaataatcatcaacgaaatgctgaaaagccagtagcgtcagacaaaattacggatgctaagctactcgccaggctagaacgagttagagcgtggaaagagtcaaaggcaaaacaggaggcttccaagaaggaggagcacaagttgaatacaaagccgcaggttacagccaaagaccagaatgctatgccttcaactggtatatccgggtttgagattaatcgccaaaaagatacttcggatatgaagcgaaataaccgagttcacatggatgatgaagatggtcctaggcgtatgaatcttgaagactaccaggagctttgggaccaagaagaccggggtatgctaggaaatgagcaagcagctagcatggaggaagacgaagtagatcctttagatgcttacatggcctctttggttggtaccactgataccataaggcctggtttattaaatacggaggtcattgatccgaatgcaaacgatgacgagcgcatggtaatttcagagactttggaagaggaagaaaatttacttgctcttgctgcaaaacgatcaaaaaagaaagacgtaatcacagttgatcactcaaaaataaattatgaagatttcaaaaaggatttctatgttgaacctgaagagctcaaaaatctgtcaccagctgaagttgatgaactacgggcttctttagatggtattaaaattcgtggtattgattgcccgaagccagttactagttggagtcaatgtggtttatctgcccaaaccataagcgtgatcaattccttgggatacgaaaaaccaacctctattcaagcacaagcaattccagcgattacttctggcagagatgtaattggcgtagctaaaacaggaagtggaaaaaccattgcttttcttcttcctatgtttcgacacatcaaagatcagcgcccattaaaaacaggagagggtcctattgcaataataatgactcctactcgtgaattggctgtgcaaatttttcgcgaatgtaaacctttcttaaagttattgaacattcgtgcgtgttgtgcatatggaggtgcccctattaaagaccaaattgctgatttaaaacgcggtgcagaaatcgtagtttgtactcctggacgtatgattgatgttttaagtgcgaatgcaggacgtgttactaacttacaccgctgcacttatttggttttggatgaggccgatcgtatgtttgatttaggatttgaaccgcaagtcatgagaattattaacaatattcgacctgatcggcaaaccgtactattttcagctacctttcctcgtgctatggaagcccttgcaaggaaagttttaaagaaacctgtagagattacggttggcggacggtcggttgttgcttctgaggttgagcaaatcgttgaagtacggcctgaggaaagcaagttttctcggctattagagctgttaggtgagttgtacaacaatcaacttgatgtacgtacacttgtttttgtggatagacaagagtctgcggatgcacttttgtcggaccttatgaaacgcgggtatacaagtaattcaattcatggcggtaaggatcaacacgatcgcgactcaaccatcagtgattataaagcaggagtatttgatgtattaatcgcaactagtgtagttgctcgtgggcttgacgttaaatctttacagctggtggtaaattatgattgccctaatcatatggaggattacgtgcatcgtgttggtcgtacaggccgtgctggccatactggtgtagctgttacctttataaccccagaacaggaaaagtacgccgtagacattgccaaggctttaaagatgagtaaacaaccagttccaaaagaactacaaactcttgcttcccaattcctcgagaaagttaaggctggtaaagagaaagcagcgggtggaggttttggcggcaaagggttatcacgactggatgaaactcgaaatgctgagcgtaaaatgcagcgtaaggcctatggtgaggacgaggaagatgtagagactgaagctgaagcaaaaagcccgttggaaaagattactcctgaaaaatctaccggtgatcccacgctcgatagagttcgtgctgctgtgggtggaattgctgctcgtgcatttgccaaccaaactgcacaatctaacaagcttactcagccaatttctataataaaaaccgatggtgatgagtataaagctaaaatggaaattaatgactatcctcaacaagctcgttgggccgttactaataacacaaatattgtacatgtaacggagttaactggcacaagtatcactactaagggtaatttctacttgccaggtaaaaaccctgaaccaggagaggaaaagttgtacttgtggattgaaggtccatctgagcttgttgttaaccgagccatcactgaattgagacggcttcttcttgaaggaattaaccacagtttggaaggaggtaacaaaccaagtgcttctggacgatacacagttgtctagtactttcggtctatccttttgaaaaagagacctacactcgtttaaaattaatcaattgaatacgttacgtgcttttttggggaagggcaaaagtggttatgaaaaattaatgattagaaatgtcaatatttattattttaactaaacatatatggattttggcatgaaaattaaggcatgtatcttttttcatcgcaaagtaaaagcgggaaagaatgattttattcacatttttaaagcgagtacttttccaactgctttcctgaaatagtgttagggtatttgctttttgtaatccacagtatttatagtaaacaataaactaatggttgaatttaatcttttgtgaagagaagaaataaaatgtaatttttggccttcaattatcagtgctaaacacaaatagtaggcaatcaatcccatagttgtttatttgagaaaaaggttctgtcagtgaatgcttgatttcatgattgatgggtttaaaagaagttaaaattataaaaatcagaattttttagcgtagaagtaaaaaccttcaattatttaatttttctccgactatttgcataagacctaaacaaactaactgtatgcgaactatattgtactaacactgcatcaagttatataattacaatttcgatgtacattgtattaaatgaatgcaaaaatttattttttttactattttcttttttattataaagggcattaaagtaaacgtagattgtctacggccatacctaggcgaaaacaccagttcccgtccgatcactgcagttaagcgtctgagggcctcgttagtactatggttggagacaacatgggaatccggggtgctgtaggctccttcttttctttcttttttgcctttttaatcctgtttttacatttgttaattatttaataggtgcgctgacctaaacacaactgcgtctcatatgcggcaaagtgcaatgtcttattttcatgaattatatacactacttattttagcgagatattaaacaaaacttgagtagctcatagaaagttagctaagattaccttttatcttttttttgaagttatttgttctagctatagttcattaactacaggcaaaaatttacctcttttctggcttctaatatttttttcgcttaaaataactcaaagtcaataagcagcgaaaaattacgtatacacaagagaatggcgctgaaccttgagccgcagtatagtaggtaccgcaagcaactaaacatcgttatagtagtagagcagttggaatttaagcgcgctaaaattattaataatatatcctaacgtggagtgttgtagtcaagagattagttattcccaagtactgattttgttcgaaaaagaacaattctcgagatcgaaaagaactgttgtacgaggttcgttgggactgcagtataactttatgctttttcatttttccctttacaattctttagaagcaaggaacacagcactgttagaaaacacgacggtgagagaagtgcttcttttttgaaagattccaattctcttgaaaaatggcatctgaaggtgattcaattgattactatgaactgttaggtattaatgaagatgctcaagatcaagaaattcatcgcgcttggcgaaaaacttcgttaaaatatcatcctgacaaaaatccaaatgatcccaaggcggcggaaaagtttcacatgcttcagttagcatataacgcgctaattgatgtgcaattaagaaaagcatatgactctgaaaggtttgctaagcttgctcgcaaaagacgcgaggaagcatttaactttcagcgaaaaagtatggtagatgacttgagggaaagagaacgccaattctatgactctttagagaagaaagaaaacgaaagagatcgacttcaagaaaaactgagggctttacaagaagaaagtgcaaatttgcgacgacaacgagaaaatcgtcttagggaagaacaagaacaatcgaaaagaagaaaacaggagactccaagcagtaaaatttcagaattggatagatccattcggatacgatggaagcggaaatatgctgatcaagtaaatgatgcatacttgagatctatctactcatcctttgggactctacaaaatgtagttatccaaaaggatatatcgaaagagaaaaaatatgtatattcaattatagtatttgaaacactttcctccgcatattccgctattaacgctgaaaaaccttctaaaatttatgatgtacaatggttgaagcctccaaaatcaaactccaatacgcctactgaaaaggatactaccgtggaagattacgaagagattacaataatgaggatgaagcaaaagcataagcaaaaacaaaaagaaaatgaacgaaaggccacttctacaatgaacgcctagcgaatttcatcaatcctgacaaatcaacatatatttagaattttcatttctcaatatgttgtttaacaacttcgctttttgctgagtgtgctgtggctaatcagctgaaaattgatcctttgctatcatttactcggagccactactaattgacctctcaaagttggtgatagtatgaaaacctgctatcactcttagcaacagcaccaaaatgctttgtgtaaaaaatgcgatatcccagagaattttggctcaatttagtcgctcattttcgtatacaattcctttttggcaaggatcggacacggtaaagcctagtttaaaattctatcgacgtacggtatatagtcgtgatttttatgcatctaacgttgtttaaagaattattgaaacaaccaaaaccaaaatttcattttgaaatagagcccaatgtatcttttctagcagtggaggagggaccagcgtcgttgcgttcttattctatagggaatgtgagtcgtatttacgatggcataagagtacctccaaaacccgaggagcctttgaattgttgccaaagtggttgcgctatatgtgtttgggatgtgtatgctgatgaccttgaggaatacaatcgtgcacgaagaaaagcaaaaaggcattatttagataaacatttacccgtgcctcctgatttagcaaaggtttcattaaaggaaactagctcattggaagagctacctcctcagttgaaagcctttgttttactggaaaaacgattaatgaaggataagcaatctaaaaacaactaattaatgcaaaaacaaaaatatataactctcatgataaggatatgataggtatgaataacatgattttcttggatatattatcaaaaaaattagacttaatgcttctttatttattagtctaaatgcttacagaacacttctgaaactgcataaaatggcattaaatatgatttacaaaaataaaagtctaaaaaactctgtattgtgtaaatgtgttttaatttgcagtcaaacttttcaacagaatttatctcataccgattcaatccattttggcaaactgaaaagcacaggaaacacaatcagaagtgatccgtaaagattttgtacttattgaagtttcataggtccaggagtttctcaagtacatgcttgtataagagatcttgcttgattttggatattgaaatttaaaaatgtgagaaaaaagtaagtggatattaccataactatctcaatatctacatacatcctcttttcattcattttcctttttcacgtcaactttcttttcatcttcctcttgctgcggctgagacaaagtagcatcgtcggcactaccatattgctgcaaaccttttcctaaccattcataataaatttcatcattaacctgctttgacaaatccgctctagaaatgtcgttgcgaaattgcggattttttaataaagtcaacatgtgcaggcaagttggataaattatgaatttcacatattctggttccctccaatattccatatattcaaggtactgtaaaaatgcctcatcttcaaagtatttgtgctgggcaaggaagtttaggtaccatggatttgaaagcatttgtacaaattctaactcaatttcaaaccgactcttatcatcgggaacctttgaaagtaaccattttgtttccattgaatcgaaacaattacttgaccatatatctgtatatttggtaaaatttggttttggtgctaccactagtaacgctacgggatatgtaaagaatagtgggctccctaaatggtgagtagaaaattgaaagagtaaacaaattcaattctaacgggcaatttatttcttaattaaattaaaattctctagttgaaaaattggttctaaatggtttctcccatttaagctgtttaattttacaagtgttaataatcaatctggaacaatgtcaaaacaacttagttgaaatcttaaagtcaacttcaaatttctaattgctcattaaagctgtctaactcaattttttgtggataccatttttatccacaataagtattgctttcttcgtattgatgatgagcgtagaactttcaattttaataagacttgttgacaaaaggaaagctataattaaatacactgaaacctttttttcaacagtaaactgaccctctagatctgtagtttcaatcaaattgacaaaaaacggataagattaagaatatatttttatggcatagtagagatgcattggttatttaaaatgttattaagttaatattaattttcaatatataggccttaataaactgttattcatattcggctcttgaggtataaagtcgttcaattttcaaacctttccgctgccaatacacagcggaatttatgagtatctcgtgaaatcagcaattccggttggtattaatgttatataagcttaaacaataatttttcaagaaaggaatactgtttggctgcataattggtctttatcctcgtatattaccgcttttgtcatttttctatattcgggttgttatcactgtctgaaccctactaaagtttttcattcatacatttaaattacaatgaaagttatttgtggatcagtgtttctgttttcacttttctttcaagtagttttaggagattgtatgttctaatgagttttttgctttgtttgctaaccagattttctttttttttttcattcactaagcataacactaacctatagatttttcctcgtcttccggtaatcctaacttgaggactacgaaagtgtatactgtagtcagtggaactcacctggctacggctgaaagcactgttagtaaaacaatcaccacgacaaaaggtttaccgactaatgcttattacaactgtgttccttctaaatatatccagtcggatatacccatgtgtgcacctaaccaaggggatcgttgggtaaaaggtcgcaagtataaagtgtcatgggatcctctgtactttggagttgataatcttcttatggtagtttcctatttaaacgatagcgggttgattgccgctaccaagaaggttcaaaattcaaaaggttcgtttgtagaggagcgggaattcagcattacttcttgcggatagattttctgcttctaaaagcgttcacttaattgttgctaactatttttcaggagaaataatgttaaaggctaacaaaggttggcttcatgatgatagtttccagaatgtcaccatcgatttggttactattagtgaaaacaatatgacgctgcttaccggaccaagaatcttacttgccaaggatttagatagtgccaccgctgccgctgagaatgcagctttctatggtccaaggagaaatatcaaggcagccatcgccgtcccgtctgtaattttggggcttattctcgttgctctcgtatactacgcttataggaaggacacttggaaaatttatatggcaaagatcagaatccgtagatccgctcctggatatggtgtgcgacgcagcaggcgccaacgtatgcaaagccgtcctgttgcctatactagtcttccagccgatgcacactttgaggactcggatgatgaggattattaccaatcacaagtaaaaaaattccattaaatctgtgcatagagaagttcttcattgttagtagcaagaagtttttgtttttcgtgaagaaagctagattaatcgtcatttaatttcactctgtttttaatcatcaaccttttcatcatttcgtttatggaaaaatcacatgtttgtttcatcttatagggtttccaccttgttaaaattgaacaagcaattaaaatacaagtttatagttgtactaaaaaggaaactgttgtagaatatctgtaaacaagtttcaagaaattgaacggtgtttcgcccttgtagaaaataaaccagcatcatttaagattcgcataactcaaatgacttttaagtcatattaattgacgttttcttaatatttctttgcgaaatttgaaatcaagtattctgtctgatgcacctacaacgagccaattgcttacatatggccaaatatcttattcccaaataatatacctatatttacaaaaagaaaaaaccatatattttatagtaaatggtatgattgaaagataatcgaaaatgtctactcttgagcccgaaaagcgtagacaacatgaagataaatcgaatgaaataattgactctcctattttcttaaataaaatttctgcattaccggaaagcgaaaacgttcattgtcttcttttaaaacagctcattggaagccctcaattaaagcagacttggcaatttaatttctgtgtcgaccttaattttttgttggaaaacatgcatgctagtgtcttccctactgtcgatgtccgtattactcatggatatgactccaagtctgatagtttagcaagactaactgcccagatgaaccattgccctgttaatgtcaaactgtacagtgtttacgttccaatgtggggcacgcaccattctaagattatggtgaattttttcaaagatgattcatgccaaattgtaatacacacagccaatttagttgaaccagattggattggcatgtctcaagccatcttcaaaacccctctactatatcctaaagcgaacgattccctttcaacttctagtgttcctgaatacggtaatccatccaagataaggaagcatgagggaagccttgacatcaaagatgatcgaaactgtgatattattgatgtagattccgcttttgagaattttaaacataagtccgatacaaggagtagcgatgatttgggtgtaatcggtcgacaatttcaacaagatttcttggcctatttgaagaattataggcacacatatgagcttattgagaaactgaaaatgtatgacttttcagcaatcagagcaatatttattggatcagtacctggaaaattcgaaggcgaggaagaaagctcttggggattaggaaagttaaaaaagattctaaagatgttggaaaaagattcaaagaaggacgagaaaactaaattcgaagagtctgacatttgtatttctcagtgtagttccatgggttcatttggacccaaacaggagtacattgccgaattaacggatggttttggttgccaacgagggaattggaaatttttatttccaacagtgaaagaagttcagcaatctatgttaggttggcaatctggttcctctattcatttcaacatcttggggaaaacagctgcaagccaagtggaaactttaaaaaaaggtaagaatttatgcaaatgggtggccatgaaagctggtagacaaagagttgcaccacatattaaaacgtacatgcgattttcgaatgatggagaactactacgttgggtgcttgttactagtgctaatttgagtaaacccgcttggggaactttagaaggtcacaaggcaaaatcaagatcaacaagaggactcaggattcggtcctatgaagccggtgtattgttatatcccaaattatttgaagaaagtcaacgcgctccttgcattatgactcctacttataagacgaatactcccaatctggatgagaaaaggagagagttttatggaaaaagagtaattggtgtacgaatgtgttgggatttcccacctgttgagtatgaagacaaggatgagatatggtcgcctgtgataaatagaacggataaggactggttgggttatgtttggcctcccaattggtaaatcataaggacgtttatgataaaaatacttcataggctttacaaaacatggacaattcgattaaattgaagtatctatacattgaagttgacatcacagactagacagcagagctttcaacagaaaatgttgagcctttttttttacaatactctaattgtttaagggtaatttacttctttattttggataggtttttatgtcactgaaaatgtttgatagccccaagtctttggaaacagtcagtaggatgttcaagaaaacggaggttccgactttacagattttaatacgtgaaattaattttttttgtttaatttctcttttctctggcaaaattgtaagcacaagataagggactattcagttggactctcagctcatttgtttacattcagaagatatataacgcatcagtgtcgctgttttatgtctcgcaaatatcaagttaagatagcacgtccaaccacgctacatattaaacgatgtattgcaaatgcattatactgaaagaaataataggaaacgaaaacagtagtccgatcatccattgattatgaaaaaacagcttatttaaaatgcattgtactttattagttaaagactaaggaacatgaatttttggcagtttaataactagtagtatatccatcatatcgattacgcggtagctaatgaaattttttttagattctttaattataggaaaatataacaggtacattttttcctatcctattacgagcatagaacaaaagaagaagataatgtttttaaacgttttatttacatttctacaattgagtttcggtagttttcaagcatgtgcaaataacgagctgcataattatgcttttgcaaggtacgatacaatatacctgaaagttgtttgtttacatagcagtgtttcctttttacctttactttccaccaagacctatgaatagaaaattgttaagttttggttcatatagaagatccgtaaaatgtttgaaataatttaattataaaatactttattcttgtgctgaaaacatgaagaaaggaaggctagtacgcgactcaagcctgttttctcattgttttgttattggaggattaatttgttttccttaagaaaagttgtttatcaaatttctcttttctttaaaagattgacgaattattccaatcaattgtttgttaagcgggttgcatattcctcaagttgctaaaagctttacgtctttggaatgtttgttgtacagttttcctctaaagaaatgtcttttcccgctcattaggataaaattctgcatcaatgattttgtttggttgttttatttactaccttgcatctatgtgcttataaacatctaaaatttgaaatttgaaatgtttcaaatttacatttttaaagcttgataaaatgcccacaagataatacaaaaatacgattttatgaaggaaaacatggaagaaattcatcatgaatagagttcttttaacaatcgcggaaaaaaattacttgtcttaaatttttaacgaaatagttgagttgatgacatttccttttcttcactgcgtcttattttgacatttcttttacgacttttgctttcttcaattgtttccagtttcctttgcttcttttactttcgtgattaacgctctactatgaaccacggtgcccaccgctataataaatgctgggggagatgagcttaccttgtttattactacggatgctgtccactacacaatcgtttcttacgtcaaatacaatcttataggcgaaatacacgatggtgatgactttcttacgcaataagatatatggttacgtttgcataagtgcaagggtgaattgagaaattcaggtgtttttatgcctacgctgttcgcatatctaaatttgtgtttctttcatcgacaaacgaagtccaaatcgacttttaaaatatttgacttgcttgtcctgtaactgtgaaaacgactatattatatattggtttataaacagacagacatcgtcaataccccgtttccaattttacttgtttatcgttcatattctttgaaaaacgtaacatccatcgtcttatccccgatacatcctctgtttatttatttatttcaatttaatattgcctatctccttcgtgaaaaactcgccgattcatttttacagtcagtgttttgttactgctgatagagcttgatacatttcttgagaaggtgcttttaaaaagagaaagaaaagaacaaaaaaaaatctgggctttataggaagacgttaataagaaaagtccttatatacacaaaaaccaaaacctccgttaaaaccgaaatcaaaagcaaaattcaaagaaataaattattttcttctttaaatcaattttgcattggtgtttgccttattgttgcttcgtatataaattgccaaaaaaattagttctttgaaagttgaacccttctttgtttttatatagtctatttgtgtactaaccatccgtttctttttttttttgaaatttcctatactttttcgctcccaatatgtctactcatagcggagattccaccaagcaacaacactatcgctcttctgacccctattcaggacgtcgtccgatccccactattccaaaattctttcgcgatcgcaaacagcgtgcagagaaaaaggaagagcaacaacgggaacagactgaaaacgaaaaattattcgacccaattacccagcgagatgtagagattaacgacgttcatttcgattatgccaaaacatatgatgatcctagttttacagttcctaatcaatcaatccaaggttcatccttaccttctgaaaagccttatttgtcatccaaccaaccaacaaatgtttataagcagcatcaagatgatttagctccaccagaagcggataatcaaatcactcgtgatgtccctattagcgatgaaaaaacgaatattctctttttcccctccccttccattgatctatcttatgtatcgaaagaggtcaaacaaaaaactggtcaatattctttgtttgcatatatattttctctcgtaatttcgtggttctttactcattctattatcatttcagccgtgttgcctctggccatttcttcatgtatgtatttatggatgcaaaatatatatgctgttgccaaggatgcggaatggggcgctgaacaaaaacgcggagaatacgctcgtttgaatttgattcccgaaagcgccgagtggatgaatcatttattggaaaaagtttggcccttaatcaatcctgaaatgttttcttctgtagctgaccaaattgaagatgtaatgcaagcctctataccgtcgtttgttgaaaatgtgcgcgttgcttctttggaccaaggaagtcatcccgttcgtgttgtttccattcgaagtttgccttcaggtgaggccagtgaatcgtttagtgagaagcaagcctctgaagctgaacacaaagacgagccagaacagcagcgaaaacaattttataacttcgaactttgtctagcttatcacgccaaacccgttgaggatgcaacatcaaccagtgctcgagcttccaacctgcatttacgcatagttttttatccaggtattaaaggtacagtgggatttccccttccaatatgggtcgagataaaaggatttgttgctagaatccgctttcgctgtgaactcatgcctgaggttccttttttgaaaaatgtcaccttctctttgatgggacttcccgaactgaatgtgtccgctgttcccgtagctgagggaggtgttaacatatttggacttccattaatttcaaaattcgttaatgacgctatttccgcggctgcaaatgaatacgttagtcccaaaagtatgactattgatttgtccaagacgcttttaggagatgatataaagaaagaggtcaatgcattgggcgttatttttgttcatattaatcgtgcagaagatttaagtaagcaggatgtgaatggtctttctgatgcttatataaccgtcggttttcataagtttggtaaacctttgtactgtacacgcgtcgtaaaacaggatctgaatcctatctggaatgaatatgcttttattcctgtgttccctgatcaagttaaagccggtgagaagatttctattgaattatgggatagtgacaggtttagtcccgatgatgtagtaggccgcacgaaaatcggtttacaccttcttattcaagattctggaaaaatgcatgaaagatgcgacacgcttactggaattagtgaagatactagtctacctggcagggtgttttacgaaattgggtacttccctagagccgaatttaaaccttctttaaaaacgagtggacatgatatcactattccaaggtctatgagagatgatccagcttttcaaaatccacatggctcattggataataaagaagaggaagctgctgtcacgactgctcctgatgaagagtatcctagtggcattttatcttttaccgtgcatcaagctgtgaatttgcaaatgaaccatccaactggtacttttggaaacgtgagtggaaactataacacaagtccggctcagagcgtaggagatgtaacagctgaagaaggttcagagctaccttcttcctatgtttgtgttgatttagatgacacactcgtgtataaaacacgaaccaaggtatttacatcaaaccctatttacaacgctggaagcgaaaaatttgttaaggattggagaaatgcaatgttgtgcttcaccgtacgtgatttcaaattgcgtgaacatgattccattcttggagtcgttaacattccactcgctacgacgttaacaacttcttcccaactgacaaaatggtatcccatacaaggtggtatcggatttgggagtgttcgcatttccattctttttaggagtatgaaattgaaaattcccagaaatttgttgggttgggatattggtactctggaattcatggatcgacaaattgttgctgaaggaacaggaagtgtatctgatgtttcattctcttcaattagagttaacatagcaggcgtaaaaattactgctaaaagtagtacttccaattcttccagcactgctgaataccatgttcggagtagacatgctgtaattccagttaacaatcgttacagatcagctgttgtgttcgagttcagaaaacaacttcagaggaaacataatgtatttgccatggtttggttggttgatctggaagacaatgtagagcaaaacattcgggtcccgatttttacttcgtccaaaccagcacatgttttacaaaacatgatagattttgatcacccggataaagagtcagaatttaaaatcattggatatttgagtactaggatatgttttcatcgaggtttggacgattcccacgagcaacttgttgacaacgacgatgaagcagctatatttgagacatatagatgccttaagtcaatgggtttaagaagaggttacgtgaaagacatgaagaatccgttagcggatcaacgagcaagcctggatgaaagccgagagactaccactgcatcttctaaatttgagtcagatgattctgttgataccgaggacgaggagacgaccacggatcggacaccaattgagtgtacacaaacagtttcaatggtggatccaaatgtcaatggagatatccagggtagaaactctctaggtacgatgaatagtaatgaacgtaaccttgagcaagaatttatttctcttggttatgcctcaaaaaaccgaccgaaagcacacgctcaagaaggtactaatcaacccggcgcttctgagaacgttgaacctgtattagcagatgatagcgatgctgttacaatacatagcaatatttccagtgatgatcaaaaaaggaaattggtgaatgctgatgatcgtgaattggagaagcgattacatcgtggaccttacaactcaaaaattgtgcgcacaggagaatgggtaaaagatggagcgaagatgggatggagaaatcttcgaagaaaatttgctttgaacggacgacagccagatgttgaaaccgagatttcaaaataaacacaactgtgcttctttttagcaacgtaaatgaattattgatggctaacgatggatgaaacgactttttgctacaaaagtatggaagaacattcttgaccgtgtgttcgagatttaaatacgtgtgtttgattatttatggtctgttcatgataaaagtactagcaacacctaaactgatgtaggaaaccaaactgatgattacatgatattatttatatttatactgcaaaaaatttatcggttggcttactaaattattacttcaactttcttaatacacgtattgagtatgtaaagttattgttgacgaaaaaaccagtccctgaagtagctaaagtagggtagggttaaggagaccagaaagcacacataaaaattttaggctttgatttataactagaaccaaccacgcacaaaaaagtactattgcaagtatggtcgcgttcacacctgaggaggtccgtaatttgatgggcaaaccatccaatgtccgtaacatgtctgtgattgctcacgtcgatcacggcaagtctacgttgactgattctttggttcaaaaggccggtattatttctgctgccaaggctggtgatgctcgtttcatggatactcgtgctgacgaacaagagcgtggtgttaccatcaagtctactgccatttccttgtttgctgaaatgactgacgatgatatgaaggatatgaaggagcctgctgatggtactgacttcttggttaacttgattgactctcccggtcacgttgacttttcttctgaggttactgccgctcttcgtgtcactgacggtgctttggtcgttgttgataccattgagggtgtctgtgtccaaaccgagactgtgctccgtcaagctttgggtgaacgtattagaccagttgttgttgttaacaaagttgaccgtgctttgctcgaacttcaaatttctcaagaagagctttatcaaaattttgctcgtgtcgttgagtctgttaacgtcgttatttctacttattacgacaaggtccttggcgactgccaagttttccctgacaagggtactgtagcttttgcttccggtcttcacggttgggctttcactgtccgtcaatttgccaaccgttatgctaagaagtttggtattgaccgtaacaagatgatgcaacgtctttggggtgaaaactacttcaaccctaagaccaagaaatggtccaagtctgctaccgatgctaacggtaactctaaccaacgtgctttcaacatgttcatcttggatcccatttatcgtattttcgatgctgttatgaacagccgcaaagacgaggtcttcactcttttgagtaagctcgaggttaccatcaagcccgatgagaaggagcttgagggtaaggctctcttgaaggtcgttatgcgcaagttcttgcctgctgctgatgcccttatggaaatgattgtccttcatcttccttctcctaagactgctcaacaatatcgtgctgagactttgtatgaaggtcccatggacgacgagtgtgctgttggtatccgtaactgtgatgccaatgctcctcttatgatctacgtttctaagatggttcccacatctgatcgtggtcgtttctatgcttttggtcgtgtcttctctggtactgtccgttctggtttgaaggtccgcattcaaggccctaactatgttcccggtaagaaggacgatctcttcatcaaggctatccaacgtaccgtccttatgatgggttccagaattgagcctattgaggattgtcctgctggtaacattattggtttggtcggtgttgatcaatttttggtcaaatctggtactttgaccacttccgaagttgcccacaacatgaaggttatgaagttttccgtctccccagtcgtccaagtcgctgttgaggttaagaacggtaatgatttgcctaaacttgttgaaggtcttaagcgtctttccaaatccgacccttgtgttttgtgtaccaccagtgaatctggtgaacacattgttgctggtgctggtgagctccacttggagatttgcttgaaggatttgcaagaagaccatgctggtatccctcttaagatttctcctcccgtcgtttcttaccgtgagtccgttagcgagccctctagcatgaccgctctctctaagtctcccaacaagcacaaccgtatcttcatgactgctgagcccatgagtgaagaactctctgtcgccattgagactggtcacgtcaatcctcgtgatgatttcaaggttcgtgctcgtatcatggctgacgagtttggatgggatgtcactgatgctcgtaagatttggtgtttcggtcctgacaccactggtgccaatgttgttgttgatcaaaccaaggctgttgcttacttaaacgaaatcaaggattccgttgttgctgcttttgcctgggcttccaaggagggtcccatgtttgaggagaacttgcgttcttgccgtttcaacattcttgatgttgttttgcacgctgatgctattcaccgtggtggtggtcaaattattcctactgctcgtcgtgtcgtctacgcttctacccttttggcttctcccatcatccaggagcccgttttcttggtcgaaatccaagtttccgaaaacgctatgggtggtatttactctgtccttaacaagaagcgtggtcatgtcttttctgaggagcaacgtgttggtactcccttgtacaacatcaaggcgtaccttcccgtcaacgagtctttcggtttcactggtgaacttcgtcaagctactgctggtcaagctttccctcaattggtatttgaccattggtctcccatgtctggtgatccattggatcctacttctaaacctggtcaaattgtttgcgaagctcgtaagcgtaagggtcttaaggaaaatgttcccgactacactgaatattatgaccgcttgtaaaaaggctgttgttttattgaacagactagatttgggttagtggaaaatatgataattacttgcaatgattttttggatgaccaaatgtaatttgtagtataatgagttgtaggttatggcactgtattcaataggttgtttagtttctcgattgaacacgatggtcgcaacttaaaagctaactttttgaggcttgttgcattgtaatatattttaacttcaatgatggagactatacacttctcaattaaagtatacaaagtggtttaatccaaggattctacaattttacaagtaaaaaaagttttttgcactacactatacaacacacgcaacaaatacagaaataaataaacagagaaaatgtttttaagcacacgcttgacgaaataccactattttatttaaatgttggaggggtaaagcatgactcggagagaagagccaaaagttttagcaggcaagttgtgaacgaagcgagcacgaacagcaccggagtttccatgaggacgagcaatggtactaaaacgataagttagcaaaatagaacgaagaaataactcataaaaacaagaaaaattatagaaataacaaaataaattatatattttgtttgaaaatcaatcaaatgaaagtggaaaaacttcaaccggtacagacaatgatcaactccttttctctttgcttttcttgtaatataaatttcacttacccccagataacacgaatcttggatccacggacggccttggagctcttataaacatagcaaacacgcttacccaaataaaattgggcttcctccttggagtcgcatccctcaatcttcacaatggaagtaccaggatgaataacgtgcttagaacgttgaaaggaaagatgcttggccttaacgtacagtctatgtccttgagctggcatttttgcaatgagtgatacgtcggtgctgaattctacacagtcagaatatgctgtgtatggaaacttttttaaaacagtcacggtttttttgttagccctaccctactattttccctgatgctgaagtggtattgcattacgctacaagttaataaggtatttacgaaaaaatacgatagaaaaaacaagggaatgttacgagctggacgctcaggcattatcgcacctaaccagttaaagtaggaggtaccttgcgtaattgataagtaggaattgtttatgggaaacatcaacttagcactaacctacttatttaagtgagctgattttaagtcgtttgtcttgaaatctttaaatatctttaagacatatattttatttattcttatttattataaacgtaaaggttttagggctttggaccggtattggtgcagatcatttgaaaaacgataaaccgggtaatttgcatcgtttaaggtattggtaatttttttccatggaaggagaaaactcgaaatccgttcacccaatcctgtctcactcaacaagcgtcgtttctgaacgagctagctcgtctggagttaatggtacaaatggcggcatgaaacaggtaagcgactattacttatgtgtgtgtatgtttgtatgagatatgcccggatattgacgtttattttgattttctgttacaattgacatctctattgttcgagcatggaacatcacattctatctgtaactccacttattttacgtttaatctgtcaattgtaattaacgctagaaataggtatctcccgtttcaactgctcgtacttctattgctcgcagaccgccttctacagtaggttcgcaaactggttcattggtcaatgcgccacccaaacgcagttctggtatagagagatttgatcacgtaactggcactgcagaaaacagacctcagactccttctactaaggccagtgttgcaaacgttaagcctgccggagctgctgaatctgcccagaatgctaatttaatttcctcaaaatcagagaacgtgcctgaacctgctggtgaaaaggttagtatgcctgaaaagcaagatttacaaagcgcccttcctagtgatgctgtctcaaatgctgttattggatggaaaagtatttatcatgcgagcgatgtggatgttcatgatcattttgcgaacgtgttatccgctcttcaatgggacagtcatcgtgttgaaccttcaattttggaaacgtattcatcatataaattaacgggccagtggtggcagagcacgtctattttgcttgctgtttctattttaagctggatcgcttctaaactatggtttcgattttttatcctcttttttattattattactggtacaattgtatatggatcttgcatgatttctgttcgtcgaaacattcgtgaagaagttgttcaggagctgtcgaaaaagaatggtgacgttgattatgaaactatgagttggttcaatacccttttacaacgcttctggatgcttaatgaaccggaaatttccaaatcagtctcgacaagtgttgaacagtccattgcagaatatcttccttctttcattaaggaagccgctttctcgacttttactcttggttcaaaggctccaaggattgatcgtgtacgcactcaccctcctgttgaacgtgacgttgttttaatggatgttgattttagtttaactcctaacgacaattatgatgttaatgattcttctctgaagtgccgtgtcaattctttgatctctcttgtcatcaaatttggttttggtaaatatatgttttctttccccattactattaaggatcttcgtttatcaggaaagcttcgtattcgatggggactttcttcggactatcctttcattcagactgcttctttttcatttttggaaacgcccatcgtgtatgcaaatattcgtcctattgatattccatttttggatgccgatatcttctatataccaggtatcggccagtttgttagtgaacagcttggacttctcctgaactctatggttttatggccgaatatgtttgattatgacctgtctgctatgatggctggtatagcatcagggactgcagtgggtgttgttggtctaaaaatctattctgcaaggcgtggtgaggtatctgattcttcaattgaccgtaaaccatcttcctttattactgtcacaacaagtggcagagaacatggccgaactcccatccgctcaaacacattttctcctacttttgatactactatttatgttgttattaactcattaaatgatcctttaaaactctctttgtatgataacagtggaaaatctcctattcttgttggcactacgtatattgatccccggtcactatatgaaagaggcttcattggcgatatttatcagttcctatacaatgctgtaaacgttggttctgtggcttttgatgcaacattctttccttcacttcttcccaagaaaacaatggatggaagtaagatcgagccgcctgaatcttcgaagggaattctcaatgtcaatttaggttgtgttaacaaccttactgagcttactgagcttactaagaaatcttctttaaaatatgtcttgtatgtcgactcaaaggaggtcgcaagtaagactataaagtttgtcgatcgaaccccaataagtctccaaactaatgcttatattgaaaataacaagaagtcttctatcaaggttgctgtttttgatgttaaaagccctgaaaaagcgatagcaacagtatccgttccactgcctgaattgttacacgaagggtatgatacctttcattttgtagaaaacccaaaggccaccattgacattgaatctttttggactccagttgacgtcgtagaagagaaaagtgcgaagacgtacattgacaatttggttggtgtcatgcgacttagtgtcattaaggccaacgatcttgtaaacgttgaattgcctacgcgtaaaagtgatccttacgcaagagtcatcgtggggaattctgttgtagcccgtactgtttacactccaaataatcttaatcccatttggaatgaaattttgtatgtccccattatggcagacactaaaacaattgaccttgaagcaatggattacgaggaatctggaaatgataggtcgttgggttatgctagcattaatgtccagaaatatattcgtaatgccaaaagacttgatagaagtgctttggctagtacagtctttggcactagtgaggtgaacgcattgactttaacttctcgtaagggtcaatcagttagaggcactattagcgtaaactgtgactaccgaccttgcctgcgcttgaatactgataactcttctaaacagtcttctgaaaatgttcagagcgctactgatccgactacccccgcgaaggacaatagtacatccaacgctgagacgtctagcattacttccgttatcagtgtcaacgaagcacttcaatatccctctggatttgcactgatatcaatcgtttctgctgatctgcaagatgtcggtgttgatttgcgtgtttttacagataatgcggcttttccttttattacaacaccaattgctaaaaccaaaactcctcgttggtcatcatttggtatttctatggttcgagagttacaattttcggaaactacttttcagttgactgacggtgccaaaaaggatcccaaagtagtgtgtgagcatagtgtaaaaactctcgatcttgtctctgaagcgctaggtcggccatattctgttgagataccgggtagcaatggtcaacttaatcacgtaagattatcgattacttacatgccagtaccaatgacactgaatcctatggaaagctatatcaacagcggttctcttcactttatgttgcaggatggacaaaacctaccaattggcgacatccgatcatctgatccttttgttgtgttgaagttgaatggtgaaagtgcatttaaaagcaaagtgattaagaagaacttaaatcctgtctggaatgaagaggctgacattgtagtgcaaaatcgagttttggatgttttggaattggtttgttatgattgggacatgggtgaaaaaccagatgttttgggaacgagtaatattgatttgttatcgcttgaaccgaacgttgagtctcagcaatcgattaagttggactcaaagactggtacaatcaatgcatctttgcgctttgtacctggatggcatcgtcgcaaagcagtactggatgtcacactagcagataatttcttacacgctgctaataagggagctaaattagtagttggcggcgtaggagctgctggaggtttagctctcgcaggtgttactactattggctcggtaggtagtaaagctgtaacgggggttgctgatggagtcactggaactggtaaacatataatttcgggcgcaaaaggaatttccaaaatgggcatgtttaggcgttccttggaaaagaatccatctcgctctgatctcacgacaacccaggaagcttcttcttctgcttctgtgccaccggctattgcacctgagtctgcaaacgctgccttaactagcactattgacaagactacgggagcacctgaattggcacagaaaaagtataaagtatacgttggtcaaggtaaaaatatgcctcataagactataaagattatcgttacagacaatcaagaccacagctttaaaaccaaatctcggaaaggcccgtctccctcatggaacgaagagattccggtcaaatggagtttgggtgacgaacttcgaatttcagccgttacttccaacttgcttggacatactaaactgggtgaagcggtatttcaagaagatgctattggtacatttagggttgtaattggtggttcatcttctgttgaaattaaggtcgaagctgagtagtatgggtaatgcttccggttcttttcaacgttcgttatactttactttcactatcttgttgtttaattcattctattcatattgactcaaatatagtaccatatttgtatattgtgctgccaaaaaaataaatactataagaagaattattaagactacatcaccagattagcgtagtgttgatataaatacagataataagaggatccgattaacaaaacaagaaacataaaagaaaaagaaagaaaaggacgctgacagtgcattcagacaaatttagttcacattactttaaaatgtagcccgccaacattttcgcttaaagcgagacggtccataaatacagaaacacaatatgtaaaattataagttttgtatgtattcttccgcccgcttaccttcttccagtaaccattctattttttcttcacaggcttcttcaaactcttttgcacatttagcatacataaatttaatccactgctcaacggtcatatccagttctttttcacttagtttgtttggctctacaggattcggtactggagattctaatagactcgagaaatctatgggttcccatggtggtgcatttgcttcaactaagggcaaagcatgttttgatttgacaggagtttgaggagccaaaaatgaagattggcacaatggatcaaatggactgatcgaatggtcatagtaggattcatctaaaggcttccggacacttggcaaatttatactcgttacttctttctcagcgtaagttttagcgaaagctgaagaggtttcacaagaaccaggtgaagtttcaacatcctttttacttacattatcgattttatctaccttcgtttccttctcaggtgtatttttcgacactgatctagtaccattctgtacagaagtcctagaatttttgatttcttgatcaggaaaagcatcacttaacgagactttgtctacctcagtcaatttttcttcaatcttttcaatattttctaattcatggttggcctccttttcttgcaatttatcagaagtttctgtattaacagcttcaacggtttgattgttcttgctctgtagcttaggagaattaatgtcatcttcttgaaatgtcactttttcggagtttccgacgtttctgtcaggaagatcctttaagtaacttcctgattcaagttcattgggttgtacgatcggctggggatccaggcttgaatgaacattcatgacagtatgaccagaattagcttcctcatgattaacattttcacttttttcatcggaaacaggacttgatacgtctctcgtcttggtcactcctctatctatagaaactctaaccgtttgggactcatcgcaaatggcctttcttttttcctcaggaagcacttcgctaatttcagtttttggtttttctataaagtccactattgatgtatcaaactttgtttttgatgttgaggtactttttcccttctctaaaactccgcttacaagattatccttccttttaattgctaagagaggaattagatcaattaaaggtttgtcatcattttcagattcagaaagcaattgtagtgactgttcagactccatactcttattctcaagatcctcaaatttactaacgtgaatggcagtttggctgtcctctgtaacttttactggttcatgtgaatcctcagtagacgaaactaaaatgtttttagattgtaaaacttcttgaaattttctcttcttttcaggaattggtattttcaaattggtctcgtcattttcatcatttgcttcttccgagtttctcttttttgaaatgttgctaaacgaatctattgtactccttggtgaaaaattggtttgtaatattttatctctgaagcttgaagaagacactctacctcctgttgcagcatcagtcatatcgggagatgaagttgatggctttgaagagattggttgttttgtggactcctctatgaacgaaccttgaagatttaaatgctcatcttctttttcaaccttctgctgttccggagtttcgatagcaacttgtttttctgtatgattttgctctttaccaacagaagaaacagaagacgaaatttcctttgatttggaaaccacagatatttcttcttcaatttttgattcgatttcaattttcggcggcgtagacatacaattattttgctcatcactttcatcagttacagattgatgtccagttatgtcagaaacagttgtgtggacggatgtagctggtgatacaagatgttccagctcattatctttttcatcttctttaagtggaatttcttctgtaaaattctttttggctacttgcatagagtcattacatatccctttagagaagggttgagaggcggtcaagtcgtcgtcatcttcgtcttcatcagaaaaaattggcttaacaggtttaaagactgctggctttgatttttttggagatttattttttcgccttggagccgtaagtaaaacgggcttcgttggactttgtggtgcacgggtgggttgtgagtctttctcctcagaggtattagtataaagggacattgttaaaggacgtgcattaagattattctttctactaggggagaaatttaaagttttatgagattttgttgaatctcgggtgggagaaacgggaagaatggaattatcctcggtcaagtcttcagggtcaatgttcgacgtagataaaaaagacagtttagtaggagataagctatttgggtctttccatgtaaaaaacacacagtccgcacgacggcgtttgtgctcggtgtaagggtcatcatccggttcccaatcatgaagattaatatcacaatataagcaatgagctgcatctttagcatcagcagttggattgtatacaaaaccagaagcagccattacactcggctcacagtgataatcagggcgattggtatacggccatactttatcaacaaaagtttgttctcgacattttgtgagagctgcagcttgggggttctggtttggattgttttttgaggataaaatatatgcccatggacagctggggctatgagtaatatgctctttcaatggatcatcatcatcctcccagtcataaaatgacttggtacacatatagcatgtaacattatcaagtctttcttcagaattagattcagagattggattgtaatagaaaccgacagtagcaagctattttcttgttagcaacacagatgaaaactctatcgtcaacatacagtttctggcgtcggtttggctcgcggccatttttttttctggaaagtgtcaagtcgtttagagtaattacacatttcccttcgaaaccgattccatcggcgtttagaagaagacgttatcggtttcattctgagcaagcttcaacaagtgaaatttagataccaaatttcgacttccgatccttaaaactataaaattaatttttttaaaacttctggttattgtctttagacaatatcagatacttccaaatgcataggatagggaaggtcgcctcgcaaggcgtatatgggtaatgtttactttttgtagattgctagggcacacgagtttactgtaattgaacaatgtcgttatattgcgtaaaatgtcgttaagtagtatagcagactttaataaatggaaggttcactggttacaaatttttcgagatgactaggtttagatattatattgagtaaggaagattcaattattgtctttaatgtcagccttatgatctttgttaataaattcaaaatttaactagaagatttttgctagcacaaagtaatgtatcatagtttggtactaatattgttacatataataatattaaagctccaactctaaagtatggagcatcgtgaaagaagaataaggctacattttcatggctattcaaaggaaactatgcatatcaacaagacaaatctgatttcattttcctctttcgatgcgatggtcaaagttatgaatacaatgatgaatcagctgtctcattagaaaaaagttgaaaagaggatgacaaatgcggtggaaatattgaacttcctaaaacctcaaataaaagttaagcaatagaggaagtacaatcatgaagacaatgtaaaataaattaattgaattagtcccatgttgtttcaaaggtacaaaacctgtatctagtagtggagcagccaaaagctacaactaaatcgacaacaaagaccaaaactgttgaatgattcctgtgtttcgtcaataaaacaaataataaactcacaaaataaccacgatctataaaccattcgttggttagaaagtgaatgaaaaaaagtaaacaaaagttcgtttcgacacgcacactcaggacggacttgagaaataatttaacaagtacaagatgttcaactttccagcacaatcattaaacaacaatataacaaaatgagaagagtgacaactgcggaatgtatgtctaggtaaacctcctaaaatgtaataatctcgtctaataacaatcgcgccatacacgtaaaggtaaatgaaaaaatcggcatcctcaattgctcaatgaaataatttaacgatattataaaccacaggaccacagccaaaatcatgaagccacttcgatgtttatgaaaatgaacaatctaaaaaagaacgaaacctaaacaagcataaatgaataatgtatgtgaagtatcattacatagccatatcttcggcattagtcgccgaaaattgaaaatcgccggcaggctcttgtgtagttccaaatgtaaacgtatcaccgacggtttctggttcaagctcttcgatttcgtcttcttcaccgaaaaacttttcgataatattgtaagctttttggtaaatttccgaattagatgagttctgacattcgtggatcaaatccataccaccagcatcctcaacgtagacggcgtataaattgattttatcagggttattcgcgcgatcaagttcacccactcgcaaaatattttcaataccatctaaagcaacctggataatcttgttatcttgacaagccagcaaattacataaaggtttgattgcgccttgctctacaaggtagcgaatttggtcgggacgacgagcgccaccggatgtggcattggaaatggcccagcaggcttccttttggattttaaagtcagcggtcgtaaggagatgaattaaaggaggaataatgttagcttcaataacatattgaatttgagaagaattaccggccgttatattactaattgtccaacaggcttccttacgaacgccatcgcgtggactgcttaacaaagaaagtaaagcacttaaagcaccacaattaatgatgacctgggtctgaacgtcatctcctgtaacaatatttcctacggatcggagagcaggagtctgtacttgagcgctaggatgcattaaaagttcaacaagcctacgaggaatccctgcatcaatgatggcttggatcttctcattagcgccatcagataaataggaaatggcccaaagggcatcaactaaaacatcttcgtctaaggtataaattaatttcgacagaacagggataacttgcgaaatgctgttccaatcgggttgtggatttttgcctcggcacatattagacagggtccaagtactattgcggagcatactaagacgcctgttagattcgattatgttaagcaaaggctccaaaactccacattgcaaaacatgatcacgacacatgggtgaatcaccagcaatgttacctaatgcccaaactgcttgctcgcgtacatcttgttcagaagaagataaaaggcttacaaaaacaggaacagcatttgcttctacaaccacgtgtgtttgattggaagatccgctagccacattagtgagagcccaagaagcctcaaattttaataaattgttctcatgagataaaaattcgacgaagcgggggacaacgcctgcatcaataactttttgaattggtgggtttgtctccttagacaaagcctttcgaaacttggcagtagcttgaatttgtgcctctatgtcatccgaatacaacgccttcaataaatcaggtaattgaagctccaactctaaatcattttccttatcttgttctaatggaatagtttcttcggcaggctcttgaacatcaaccagattacgacgcttgttcaaattttcctcacgtttttgtttacggatttcgatttgctgggtttcacgtctgcggcgtaactcatcagcctgaaatgtacctttacctttgtaattctgtcttctgtgttcaggaataaagcgagaagatgcactcatgttcaattcctttagttactcgttctctaaacgtatggcgaaggatacgtctacacttggctgatttcctgtcatggaccagttcatcaatcgttcgtaatgattatagcgaatactccagataattcataaaaaactattatatatcttcttattaaaataaatctcctttatgtataaatatttttatatatgtatatatttcatttttatactcttccatttagagagctcgtgaacattctcttaaaaatagttaatgcttccagtgtttatttcagtatatctttgaagcttgcgggtatttggcaattttgtgtagaaaagaaactaatatacagcttaacagaattctctagccataaaatacattttaaagactgcaactcttctttatgtattcgcaaagtgtctgcaaattgcatgtgtaaacgaatttggtaatgtcaacaactatgcttgttgtgtagcgctaaacacttccagtgaagaatgaaatgatctttttcttatctaaaaattaattttgcactagatgatttcgtttcttattccaaaaaaaataagcaatttgtttgggcaatgttaaagcttttactatactagataacggcctgcatcctagtcgaggtcgcatttacagagcacggttaacttttcaagaataatcctttgaataaattgaaattaaaaaacaccatatacttcatcagccatcactcgttctgctattattcaataaattgagattaattggtactccatgtagtgtattttaatgcgtaacgtaatgtttattagcagtgttggtgtagctcactatctaacaactagtgttgcatagctttcaaagtatgataaacgaaccaaggcatcgttattatagcgtatttggacgctataaaaaattaaataaggaatagcgataactagtgtgtggcatagtgacacgaagaaaacttaaagatttaatgttcttttaccgaattgtgattttgtaccctatttatttgtgactgttttttgggtaagaagagcgtaggaaatgagtgcgcgaaatcctgaaatttacaagttaccaccatgtcggaacaaggagaccaaattgaacaagttgacgtcgtcgaagaagttgaagttgaggctgccgctcctgaaactgtctccgttgaggatgctttgaaggaagttttgaagcgtgcccttgttcacgacggtcttgcccgtggtattcgcgaggcttccaaggctcttgaccgccgtcaagctcacctttgcgttctttgcgagtcctgtgaccaagaagcttatgttaaattggttgaggctctttgcgctgaatctgagactcctttgatcaaggttgccgaccccaaggttttgggtgaatgggctggcctttgtgtccttgaccgtgacggtaatgcccgtaaggttgttggatgctcttgtgttgctgttaccgtaagtttaaatttagcctggcgcaggtgaaaggctttgttccttgttgattttgcatatgattaactaacatgtaatttaggactatggtgaggattccgctgctcttcaaaagcttttggaaagcttctctgcctaaactatctagtggtaaacgaagcaatatgaaaggatttaaaaaaaatttattttctacttcagaattcgtgtgtaaataggtttttgtaaagtgaagtcagagagttgagtgtagttttgagtagcacaaaataaatcgaaagcattctggctattcaacaccttataaaaggatggttgtcgccttattcctgtgtcagaaaagaaatcagttttttttctgacaccttgcgtattgatgatagagaaaaaagcatatattgttcaactgctgctaagacttgaatattatgcttacttttttaaaatgataaaaaacgctaatgtaaacaaacttacacttgaggcttataaaaaaaccatatccattagcttttgacaaagctttttcttgtccgatcacttcagcatgtatgaatttgatgagttgttcgatttttgcatttgagctaatgaaggatacaatgtaatttgaaattgaacggccaaccatttcctcaatataaatcatcaaatccaactagataaacttgtgttagtaactctaattctataaagtgaaacctacaagttttggttagctagcagtcattaaaggcagttttcacattttccatttaccaatctactcaatttttaaaacgctgcgagagatactgcatcaaatgttatagttcatgtataaatccttactttgaatatttaaaattatcgttaataaaaaaacacgataaatgaaatactctcctcttcaagaaataatttgattattactcctcgagtgttggatttaagagcactgttcgtactaatagtcatgggagtacctcgattgggaaggtttttggagccatttggaaaaccagtatatttttcttcatacccagaggtacctctaaattgcagtctcgttatcgatggaccttcttttgctttttggctttggttttcccaaggaatagtttgctccgattttcaaggatatcagaaagcagtattggatttccaccacttgcttagtaggttgagattcaaagaaatgtacgaataaatgaagagtttttaatttatacctcaattaattgaagctcctcttgtggtttgcattatggactatcataatgacctttttttgacttattcactttctaacgcatacagagaatacatatttgatggtggacttcccttttccaaacaccaggttagagtcaatagatatcagcaaaagattaatgatctacgttctgcttatataaatctttgtgtgccaattgctcaacatgtgcttatgggacttgctaaagccaaggtaattgtatgtaacgaagaagcagataaatattgtgcatttcaagctaaaaagcttgatgctgttattttaagtcaagactcggatttcttgctttatgatatagacacaccacactatggatacatccccttgcagtctttagatgttacttccaacggcattagtggaagaaaatacaggtttgatgaaatacaaaaagatttccatttcgatttgcatattcttgctgcctatttgggtgtagaagggcatcctctcgacctagtaattgattatcacaacacctttgagcatatttgcaaaatcttagagaactctgtaaaagataaatttatcgaaaagttagtttccaaagaagaattgactcgcgttcacgcattctactcgcttaatgacctcaagctagaaacatctactataaatacattcatgtggggaagagtccaggagctcttaaattcacagctacagccagcagagatatggttacctcagttattggaattgcctagcaaacactgtagttggcttgaaagtgctccacttcgtcttcaagcgtatgccaacttttccaagcaaatgccagagtttggaacagaggtattagaatattttcgtttgagtgaccggttatcgaagagattgatttctgtagattatgattatgctacagtctgcgaaacgttggatagcaaattttctaactggaatttaccgcacaggctagtactatggactttacggtgtatgaaaaatttaaacaatattacagctaccagtttcctcttaatgcatgtaagtctattcttaggtagtcctatgaacttgcagccggtggaacctacgcaagaggacattgccagcgtttctcgttttatagcgacaatatattcgatatgtatgttgatattcagtgaagacaaggaacagtcttctattagttttcaggaatttgtttcattcagccctctatcaagcactttaaactttgctttatttcaccaagcagcaagtaagctgaagacaggtaaaagcccactaagcattgttacagataaaactactgcctcattaacctataaaatgtacaaagacctcacgaacgattactctgatatttacatgataatggatatttggaaaccaaaaaggaaacgcaagactaaaaaagatcaatcatagatatacatttttgtcacatgaattacaatcaaacaaaattttttgggaaacacgttataaaattaatgaattaaattcaaaacatatatcgaatacttttaaaccgtaaaaattaaaagaagcaattggcttgcataaaccttttttttcaacctcattataatatgcgacaaactattaacaaatacatatattctatcgattggaatatccgtttggcattgaaacaccgggtggggcatttaaattagaggactccgacgtattgtatgagcctggtgcaccagggggagctgttgcaccaggtataccaggcatagcaggaacagcgggatatccaggaaatggtgcgggcatgccaggaggcaaagccattccaggtggaaccatgggtggttgagacatattcaggttcggcataccaggcgccccaggaattggtggcagaggcacaccaggaggagcgaatgtagtaggtggaaggggagcagaagtaccagggatgaatggcgcattttgtgaaggtactaaattagaaggctgtacagcggactgttgagttggctgctgccaaggaggtagtgaacttggattcatagaaagggcaggggcagattgtggagcagcaggttgctgccaaggggctggatttgaaggggcggctgatgaagctggtttggcccaaggagcaggactagaagtgctgctagataccgaagtagacgcagcagcccaaggtggagggtgacctgcttgaggactagcagctccactttcggaaaattcaatagatttttggggttcaccattaccattggaaatagccgatcccccaccaagctcttgcataagactttgatattcccgatcagcagtagaatcagccattggaggttgttgatctctaacaggacagtcgcgagcaatatggccaatacttccgcaatgcctacaaacaatgttcattgtgtgattgatacgttcaggacaatcgaaacgacgatgacccacgttaccgcaattttggcaaacctgattttcatcgtctcgtaaagtaccattaagagtagcaagctgacgaagttgatttctttttaagtcgttttggccttctggaacagaagcggccgtttggataacattatcaattagttttatggcatggttaattttatcttcagagtctgcggtaacaaggcagtgtaaatcttcttccatattacctcggacagatggatcgcttcttccttttccttctttaacacttcctttaccacgaatagcaattttggctccagattttgcttccatatccttcaaagtgtggccacgaggaccgatcaggaggccgatgaaattaatctctggataatccttaacgggaacgtaaaccttctcttgtgtttttgcaggtcttctataatcactgggagcacgaaagcctggcaccattttcattgcgcgctcaataatccggtgacgctcatcctctagctttttcttgtaacggatttctcgagtattcaatcggcgaccatggttatcgtattgcggaggaggagaaggggaccgttcacggtgatgaggaacaacatcaccggttctaagcttttgcgtaatttcttccaatcgaacattcaaagagtataattctaattgctccatagtcatacaggatttaacggcagtttccagctccatttggcttggtaacatttcctcaatcggggttggatgaccccaataatgttttctataagctcgacgacctcgaccatcgtgatagccatccggtctatgatccattctggaattgcttttataagaatcgcgataaccattactcattccatttgcatcaggcaatggtggtaaagaatctggtttttcgtcaaaccgcctccttcctaagggagtattattcgaacctaaaaatattaataatttgcactaataatctcttaaaacacttaccagtagaccctactgaccttgaattcagcattttaataagactgctagatcgaagacgggcgttggttcttggtgaaaagtaacgactgaaatgtaggaggcaaggaggcaataaagtaacggacgaaactgaagatacgacacgtttgagacaaacgagtgcaataaccgtctcgctaaaaaagaattaaatgtataattacttgaataaattttcaaatgagactattcagtcaatgataagttcaaccgaaattttttttttctaacaatacagcaagcagttcttgcacttgtttcgatattcagttattgatcttaaatcggtttagtgtatctctattcattgcgctaaataaatctaacgtactttattataaacagctttaagcatcattgcaatttggatttacagaaacgagactggcggattacggcttagatatgatatggaaacattcatctttcttaaaaaataatcagacaatgatggagagttccacctctgtttggtagggtaaagcgttgattcttctttttttttgcgattaaaacatactttagagttcgctaaataataattcaagcatcaaagttaagcgaataggaattgtaaaagagaatattgtaatattatattgtaataccagtatacaggcatatccttattttgtatcgaacaatagataggaggtttttagagggtgagtaatgctcaagaataagtcagtagaaaaatttttgatatttttctgaatttggttcataattagatggaagtgcaaactcttattgcccatgaccattttgttgagcttgggttggaattatagcgaaatccagcaaggtttacattgagaaaccagaatcgaaattaaaagaaattggttttggaatgataaatagtacttatgttttagttgataatgagaaacatttttgtaaaacaggctgcgggcatacaatctttttttcatattccaagcgacattccaccactcggcatgcaagccttccttatctgatcagataatttgcctagagaaaaatttactcatgaagaaaaataaggattcagtgtgtttagtgctttgtttaaattctattaatttaattctttactatcaaactcaaaaatgcatgataccataacatcttaggaacattggaaaggatctgattttcattaagaaacgtttttgccaaatgttcatacaactccaatatgacccgttttactgtgtgaaagaagcagagtcaggatcgtaattttttcgtaaatgaatcaagctgcttgcattttatcaaaccacagaacctagtgtgaaagttcgaatttggggaataccgcacttcaccatatgctgaaaaaagtcgttaacaaaaattgattccaaaagatgtccggtacgctgagtgatcgaaacaaccggctcgttagaaaggcattccagtaactcgttagatctcttataaaaatttgattcccaatttttttacggctcgttccgtctgtttcatccatttcccacattcattcgcattttggtattgagccgttagttgatataattctggatttttcgtttggtaagacgctaatgcatctttaagttttggttgggttaatttaaactaattatctgaaatttatagttatcattccattttttcggtcgactgcgaaaatatttacttttgtcgttttatagatagcttggattgtatttgttgggaatcaatttagataaatattttggatagtctttggtgcattgtcgaattttctcaattctgttttggatttccaattttaacacagttcagcttcatcgatattcattcttttttttcggttcaattttgcaaatacgctacatattatcataataatgccaatttctagtcattctcatagtgggcagtatgtttgcttttaatttgtaaacaagcgatacatgttgatgtgtttgcctgagattttacagatgaattttttttttcttttattcagtgacaaaccactaacttttattgaagattttgtttgcatgcccagggcaaactagaagatgtaattcaggaagccatacaacaaggttttcaatcgttttcatttacagaacatacccctagagatcgagttgaagacttatatcccgaagaagtaagtgtgcttgcaggatgatgtgtgaaacattattattattttataggtcatttcaagttttggaaatgaattgtcgggactaagtttcatgttacatttgagctttgttatatgatattactcttgtattaaaatgcttttacgatggactgctaactatgattcatttagctacatctacaaccagaagatctctttaaaacgtttgatgaatatgtgaatgaagctcgacgattgaagcaaaactatggagaccaaataaatattctaattggtgctgaaaccgaatacatacgaccagagtcagttgaacttttgaaaagcctcaatacaaaatacaacttggattactttgttggcagcgtacatcatgttaactccattccgatcgatttttctcctgaactatggcaaaaagccttacaacatgttggaaataatccagaacagctctttattgattattttgagcatcaatatgacttgatgcaacggttgcatccattagtgattggtcattttgacttgatatgtctttttgcacctgaagacgctaaggaagttttcaagaactcgaaaagtgtttgggaacttatacaacgaaacattaaatacgctgtttcttatggtggtatctttgaaattaacacctctgcatttcgcaaaggatggaagactgcgtatcctcagcaacgacttcttgagctgatggttgaacaaggagcgcaactcactttatctgacgatagtcatggaccacatcaagttggcttgaattatcatttggccaagtcgtatctggacaaatgcggtattacaagcctctgtatgatagaaaagggccccgatggtaatggcacggtggttaaaaatgttacggtcgacaatgtttggtctaaattcgttggcacaaacggaataactaacacatagaagtaatacagtttaaatttgtttccgtattggggccatttttggacttgaaatttttttacaagggaaattcaaaagtacactgtttggtcacctgaagtatagtaactagctattcaccatatttcaatcacttcgtatgaaatggccggcaaagcttttgttgtggtggatgatgatcccatttatgaggagctcccgtttaacaagactgtttgttttacacgagtactacgatgtctcaatatttgttccacttgcacatgaactatcgattgctacgatacatagatttctgtcgcttaaaattgtattaattgtacattaactcaattgagtaggccgactaatggccaacactactgaaaccaatttaagggaaaaaactattctaaataagagataaccatgatgtgacgttacaagcaaagcatgggtgggaccattgggctttcgtcaagcttcaaccgaaagtgcaaggaggattgcttgcaaaacatatgacagtacctgtttcaagcttgtttgaagggaagaacgatagtcgtacgaaattgggataaagcacgaaagcaaaaaggacaacgaattagtgcgaaagggaaagagggcaaaggcaaatagcggtggaaagcgaaaacaaagcaatcaccgaaactgtttgaaggaggacaaaaaataaaaaaaaacaaagaatttaatatgtccggattgaaagaaaaaaaaatcaatattagtttaataacggaagagacaagaaaatgcggagaaaatagaagcaacccaactagcgcacatacagaaaggcttcgttgcctttttatttggaaaggggcaaagatacctacgaggaaggaagtaaccagctttaccgaatgattcgccttgcacacaactaggaagagggagaaatgaaagatatttacatcaagcagaccgtcagtcaaaagtaaagaagaaaaaaaatttatattcaaccgctcaacataagttaaacaaggattgagaacgaaattctcgaagaaaagaggttgtgtgttcacaggtaggaggaggatgggcggaaaagttgggattaatggtcaccaagattaggagagatgctagaatggagaccgccacgaatggcattcatattagcgcccatgttggcacccatattagtgcccatgttaacgccatggggagcgtaagcagagggaggctcgagcttggacaacaaatcgttatgatcgagaagttgttgaaggcgcttattttcggcaagaacttcatccattttagcatttacctgcattaatttttcctcattatcgtgaagatgtttggagagaaagttgaccttggcgacaagcatgtcgacgttttgttgctcttcagtgagcttcttgagacgttcattaatttcatcattgcaatcacacttgcgcttgccaaccaagaatttttcgcgatactgttggagctcgctgagacgggccttccattcatcgcaaagttggtcgagctcatcctcttcgggagtggtcttcatgccgggttgacgatgggccaaacgctgttcgtagacgcgcatgatggagatgatttgattgcgacaggcggactcggtatgaatagcgaggccctcgtcctcataaccgatacgggcgatcttggcgtaaaactcactagttttacggtcgacgagttcgtgcttgtgacgcacgactaagcgcatgagcttgattttttcctccaaggacaagtgagtacgctgtgccttggcgggagaggaactgggagataacgaagcattctttcgtttatagctcttcagttccatcttgggagcttccatagaaaataggggatccgtcttgaataatttataggtggaatttggattcgattgtccgaaatccaaattgccgctaggggaagagtggtgtatagttaaaaaaaaaaaagagaaaaggaaaggaaaggaaaagttgtcgcagaaagcttttgctttggatataaaaggagaaggatgaaaatcgaccttttatagaagaaaagctaagtgagaggaggagaaaaacgagacgagatggaaaagcaatcgaatcgtataggaggaactaacaagatagtaagtatactatgtactagacgaacagtataaaagcaaggtaaaaaaacagagtcgagtcgagtcaagttaagctaagctaagcaaaagaaaacaaagcaaagcaaaacaggagaagagtatatagtagaatagaagtttgtagtagaggtgaaaagacgcttccagtcgtagacaagtagagccaagctgatctgactggtgagtcaacacaagtagaagaggtaagagaggttttccaacaaaggcagggcaaagcaaaacagaggaaagcaatgcaaaccgattttgaatgaaattatttaaggatctgaacgaaggcaagtcctacacgacactgcaatacgatggagagtgtgttggaggtgttggtaaagcgttcgttgggatgcgcagcgaggtaaataagatcgagtgccaccaaaacgcaggcacggtcggtaatgatgacatacggtatcgctggtaaacggtcacaacgagggatggggagagagccaatgaaagcgaggaataaggaggggcgccacatctggaacgtgcgatagcgatgagaatggaaagactagcaacgatggtggcgtcatgtggattgcgtattattggataaggaggtgctgatttgccggctcccaggagcggaattagtgagatggaagagtgggtggaaatgtgaagataagaaaagattgcacaaacgaacaaacccaacgttccagtgggttaggggagtgatgaagggggggaagagggatgcccgcagagtaaagcaaggagggagagggagggtattagaggagataaggagatgaatcatagcgttgtaattggaataaggaagtgaatcaagtgtagtaattagaataaggataaaaatcactttgtagtaattagaataagcatgtaaattacattgttgtaattggaataaggaaataaaccacagtataataattaaaataaagtatgttgaaactttttttttcttattcttaacattccttattgtgcgcttttctctttccttttctactctagggctttcttccatacactttttgcagtgtggacattcattcgattgcagtatggtcgccacttttatagcagagaaaaagaaagagaaataatagaataaataaaagaaaagaaaataaaaatacaatcaagatcaagtattttttttatttttttctttcttttctttcctttcttttcttttatttaaacattgttagaccacactttgtttcacctaaatgcatcattgctagcaatcgacaaaagttgctgtaagcatttatgaatattggttgatcattctgattttcaagagtttcattgagtaatctgaggtcgacccttgaaatgtatggtgttgagtctgtatggattgctagaattgttggtaccattcgaattgtttctaccttgttgcaacgaaacaaaacttggagggggaagcaaacgaaaaagagagtaggaaggagtgcagtaaatgaatagggatgtagagggagagacagtaaaagacgacatagagaggcagtaacccgaataaggctttagaaagagtatactaaaaataaataagactataaaaaaagtgcagtaaaaaattaagaacttggaaagagtcagtaaaccgattaagaatctagagggagagcagtagaaagagttttgatagaaactaaatgattcaactcgcacacatatatatatgtaaagtaaaatatacagagtgtgaaatgatttacatgaaaacacttgttgggtattgtaataaaaaacaattcgcaggtaaacaaagaataactaagaatcaaatgagccacaagttttctatttatttaattttaacttgttttttgtctgacaacaatattattttcatttatttacttgtttgttcaaattgttgtaaacaaagactaatttagtgattactctgggtgaaagaatgagcaatgcaaaataaaaaaataaatagaaaataaaaaaaataaaataaaaataaaattgataattaaaaatataaaaaataaaattaggaaaataaaattaggaaaataaaatcttgaaaaaattcactttataaaaaaaaaaaaaaatcaaactagaatgcattttgtaaaggtcttgtatttgtcatctcttcaacactgcaaacgtcgcttcagcattttccctgtattctacctgaaaaaacagtatatacaaaattccgccctatcaaacacatcgtatcctctacaatatctctacttggctcttttccactttaacattacaatctttctgctgcttgcacatttaatatttctatcttatttcgttaaacgatcatgaaccaaaaatacaacaaagcgtgcttccaacacaagacatgcttctaacgcaaagcgtactctaacaaacgtgctccaacacaatgcgtgctcttcacacacacatacaatccatctgccttctcatcactcagatttctccaagctcaagacatcccactatcctcctctaccgtcaccgttgcgtttgccgggtatgcacctttgcagttttctgtacgacatgactcttccttgcaacaatgtcctccgcaacacgacggtggtgtatcgacacattgcgttctcggcaaaagatgtgcttgagtaagctccttgaacacttgatgaccagaactcgttacaccattcgttagcggcgtgctattcttgaggttggccttcatttcaaatccactcaccaaacgaccgtttacccatacttgcgccaagtttcgatcgtcactcgtaaacacccatttactcagcataaccggccacgtatcccgttcaaagatgtcaacgcaagagtgtgtctctgcagacaaatccacaatcaatgcatcccaatacttaccaacggcaaaactgccaacttggtcaccccgagatactacctctgcacctccttgagtggccaggtaaagaagctcggacaggtctagcatcacctttggatcgcccaatacgtacgataaagaacgagaagtcatcgccgcatgtcgaagggctataaggatgctgggcgcatacccaccagatacatccgtacccaatcccacattgattccggaatcgagtaactttctcacattcgccagtccactagctaaaatagagttactggtgggacaatgcgaaataccgctgctacgcttcgtcagtaattcaatctcctcgtcctccaaatggatggcgtgtgctaaaatcgtttgtggtgtcaacaatttataatagtcgtagacgtctgcatacgattttctttccggaaacagttcttttaccaactcaatctcggatgtgttttctgaaatatgcgtttggatgggtagattatgcttctcagctagttctccacatccactcaacaagtcttcggtacaagagggcgcaaaccgaggcgtgataattggagtgaccatttcccgtttcggatcgagaatgctcatatacgaaatcaattgacgcgtagcctcaagggaagactctgcggacttttcgcagtagtgatcaggtgacaaattattcatgttgcattttccaatatacgcccgctgtccataagaatagcaaatttcagctaatagagccgatgtaggcgtgtgtaaagtagaaaaatagctagcaaacgttgtaccattcgataacgttcgttccaccacccgtttgtaaacctgacgagcctcttccaagtcggcaagcgaggattccaacggaaatgtgtacttttctaaccattgcaacaatggcacatcaattcctattccactgtttggatactgaggcgcatgaatgtgcgtatctatgagtccagggaacataaattgtaagggcttcaatttgtggatagttgcctcttttaaaagatgatggctcttggcctcctccaacgtttttggagtcatagatttttcaagaaatactatttttccattgtacaccccgacagtagcatcggtgatttccaactcgccaagggaaggtgtgtgaatgagttttccaacaaatacatcgcatgtatgaccatccatcttttttttcaaaaacaaaatgtcaagagagacagcaacaaaatttaaaagaataattaacaggagataaaaaataaatttatttatataattatagagattaacgcaacactgatgcgataaacgataaaaaaaaaagaacgaattgagacaaactcaagagagaacaagagacaaattataaacctctattttcttatgagaattttccttttcttttttttaactatttaatttgatatactcgaagaatatttcgatatcaaattcaccgaattcagtgtttttgggttatcgcgaagcaaacagataatttacaaaagaaaaattgcgttcaaaggtggatttaaacacttttgtttgattcttctccttttcgatgttgaggcaaaaggtagatggtaaaaactggattgtggtgtttatatagaagaagtggtgtagcaacacaatttcctacaccctgagcccatgtgaaatgattcggcaaaaagttatcaaaaaacggtgaagcaaaaggcactgatagcacttgagccgatatatctgaagagcaacctcaaggcccccgataatgggcggtttagaaaagtaacatcaatttatcagtaagtttaggggggccaaaaaaaatagattcggttgtatttaaccttaaaattagcgaaaacaaaagatcgacgttaaaatataggtgaaaagagaagtatagatatacaaaaatattctacatacgagtaagcttatcattgacgaattaaaatatccctttttttctttcttttgattgaggaatcataaaggtttatatcacttcatctgattattcctccttcatttaaaaactatgttaaaggatacaatgtgaaaaaggcaatgagttaaaggaaagcaatcatttcaaatacaagaaaattatggattgtataaaaaaaattataaaattataaaccaatcaactaaataccagccgcttcctgttaagcgtcagccataaaaatgattcatttataaatatcattattgcttattccaatacaatacacttttattaatgagtatgcagaacagtcattaccaagttaaattaacagtaaataaatatccttctgatgttggtaagtgatcgactattcatagttgaaatagtattcaagcagtgattcttaacgacttgcttttcctttttttttttttttttttttttataattttatgtagaggatcactcacctcctgtcttattatcagaagaagaggaattcgagttattattaccatcattgctgctgcttaaagaagtagatgttgcattttcgtcgccatgaaaacctaaattcttcatatcatctttcccaaacaaaccagtgtccattcgacattgcagatatttctttgcaagcaaacgacattcctcctgattctctcgtttcacttttatgcactccaagtactgtttcatgacatgagtgcattctcctgcacgacaagtattagtaaaaaaggtaaataactaccagaaaaaaatactttgaccatcacataccaaaatgatctaaaggaaaacttcctcgttccggaggttcacgagttgtcatgggtagagatccaccagctatcgaaattcattgttaacatataactttttaaaagctcaatatatcatataggattaagaaatatggaatgggaagtctttaactttgtcagttgaaaaatgacactcatcaaatgcagaataaaaagaattagaaaatcaattccaccaatgcaagcattcaacaactcaaagctcctcattctttaagattgtgccatttaattaacggaattaaaaatagtttcttatatcagtagtagctctgagtaaaaagttgcatgccaatcataagcaaacatagatggatagattctattcaatgaaactgttcttttcataacattcgattttatgtgattttgcaagtacgttttgtttagaagcaaaaaggacttgttttcccaaacgatttcaaatgctgaaacatctttgaacgaacaattacttacctgctccgaatgacatttttgaaacgttagactggtcaatgcttattatttcaatgcaaaaaattattcaagttaatgaaattatctttatccaagtttaagaaacgtatgagttagaacaatggatatgagtcgtttacttcgaacctaaggcggtggatgaagatgtaaagctacgtcgcacacaagttcaactgtttacaaccacataaagttgatttttcgactgagtacttcctaattgaagtagtctggtggatttggtattctcacttcataatacgaacaaaatacagtaaaattatagacttgaaaggcaaagctaaatttacgctatggtaaaattatcaataaccaaagttaatttcaatacgaaagttgaatttgaacacaataattaaatgatgcatcctttcataaccatgaatacctgaaagtaccatatttcatcacctatatctcccgagcaaagtgtatcaaagtctatagtatcgattatcatctacatatacatgaatattaagttacagacataggaaatcgagacaactgaaagccaaaaatcaatggttttattttgtaaaaagaaaaagatagaagtatacaaacgatgaaatatatatccagaaatataaaacacttcttcaacaaccaaaggagctatcaaaaacgatcgtctaacgtcaggactcacattagcaagcttttgaaaagtatgtttaatcatccagattcaattttttgaatgactcagcagtctgactttccgttgctggggcagcaccggattcagcagcaattgaagcattagtagttccagccttctttgcattctttttatcttgttttttctgtttcatggccttcttcaaatccttgggatcaggataggcagccttcaaaatactatccaagtcaggatattgcttcaactgctcttggacaccagccaacaaagtattgacagatgactcaagaccaagcttcaaatcttggggtgaaagagtcaggtccttgtatgccttttcaacctcttcataagttttgaaaaccattcttccaccaaattgctctggacgatcaatgacaaattcagtttcgccacgaagttccattgcagggaaactgacgtatttcaagaaagccaaacaaccattttcctccacaacaccaggctcgcaaaaagctgaacggattttcttgtttacagttttgggatcatctaagatatcaattttggcgttggcagcggcagaggaagacattttaccaccagcaagactgggcaccatagggttcattaaatggccacgcttcttgtatcccaaaactggtaacacctcttcagccataacgaaaattttacgttggtcaacaccaccgaattgaacatcaacaccaaggtattgttcatcaagagcttgcatacctggatagatcaagcttgacaatagaggactagcgacctgcttgacaacttctgcaccggcacgacgagcagtgtgctctgtcgtagatgcagcaagtcgaaagttatcaagggtataatcctccttcagctgatagctggagccaatgacaaaacgaagcttctcaatgggaatattcaacgattttagaatagatttgacaataatttcataataacgaacacggtgttgaacgagttccatcggcgccttcatgttatccaaaaaagcatggacatcggctaaaagaacagtaacatgtacaccggcctttaaaaaatcagccaacttcatcattggcacaaaataaccacaatgaggacggccagtaggtgcactgccccagtacaagctgatatcgcgttcattcaaaatttcgcgaatcattttggcgccaagcacctcttgaagattacgagtaatcaactcatatttttcatccggagtaagcgacatcttgcttgatatccaacgttaaatggaactcacaaaaattggtgatgttggttaacgatgttttcgattgcaatcatggactgcgatcaacgttcggaattgccgcggcaccgtgactgcaacccgaacaacaaattattcagacaaaattattaaccaaggtttaataaataatttggtttaattatgtgcaattactaataaaatatcgtttaaaaaatgtttatgttatcaaaacattcgtaaaaagggtaaaagcggttaattaatgttaacaggaataaaccttttgggaagatgaactgagttgcagaggtcctcggttttcgttataaactgctgaaggtctaaatgtcttgtaagcgacctgcgaggtgaaacgctaatacagtgtttagcatcaagattcatatccaatggacattgggcataacaacctggtgagagtgtgatacgaacagaaaattccttatttcctgaaggattagtcctctcgaataactcaaagcatatttgagtgagataatctaattcgggaatttgatttctaggtaatttcataggtagtcctgattcaagtatacaattaagcaaggtatagatatgagactctttagtaaagtacattcttgttgaagcatgatcagaatctcgtgcctctttaatgtcatgtatgatttgacgaagcaacggtacacttgttaataaaccaatttctaacttttctttcggttctataccatattcttgaggagaaacaaaatcaaataatacttttgctaaatcgtatagctcatacaacttttccaacggcctttcagtgtgattagtatttgcaccggtcatcccaacaagattgccattgctatcggttctttggggaggctctttggcaatcaagcttggactctgaggcaatttgagatactgatagggagtaaatatgcgttccaaaaattgccgattgtgaagagcatcatacttcaatgtatcgtatagttcagaaaccttggatgggtctgctttctcagagtcacaaaattcgctaaacaacttctcccacctttccctaaagagcgcaggattttcattacaacaccaacgcgattgaacttgctcaacctcaggtcccaaaataataaaattctctctcattactgcgcgatgatatttcatgagttgaacaacttgttgcattacttcacaaggcttgggcatgttttctggccaagtaaactcctttctagccgtatctccaactcttaataatgatttcaagtgtttcttaaccttatccatagtatccttggcagcattagaatcatctaacagatctttgcgaactttgagtaagtcgctaggaatagtttcttgctccaaaaaggccattgcaaaaatttcagcagaagcagagacacgtctttcagaagatgtgtatatttcgacatctttcaggcaatcacgattcataatatacaggtccttatgaaactgctctcctaaatccttagattggtatctcgcggaatgagtaaattcaccaccccatttgataattagctgcagtttcaaaagctttccctctggggaataagccggtttaagttgcacttttgtccccggtaagtctttcttcgtttccaaagctaagcgtaactgttttaacttgttgatatcttcgcatttgagttctgtagcaaggttggtagctgccaaaacagaattgagttgttcgtttcttaaaataacttcctcggtatgaccttgcaataattttacaaatggatcagatgtaaatgaaaacttaaacttttgtttaggtgtacgatccgcgtgacgcaggactccgaccaaacttttaagtctccatgcctcactttctctaggcggaggatttaaaacttcttggactgaaggtacacgattccgtctatgacgttcggcaacatgaaacatttgtttcaaaattcgagcagcattatcataataatcgttgttatccttgacgaaggaccatccattcacatcaatcacatacgactgacctgagacacgaagaagatcaaatccacaaacaggttgctcaaacgcaattgatatcttagaggccatatttttttcttcctctgaaagattggtgataaacctaatttccttaccatgtggattccttctcacaattccgtccactacgggtgatttgcgggtttctgcatggctgtaatgaggacccacggtataaacctttacgtcttccgcgttatcgacattcatgaattcctcgtaaataaaagatccttcagtgcgtggagcacaaagatctggatcataatctgaagacttatttgcgactttacgaaataatttgcgacctcccccaccaacggatttagggaaataaatataaatattgtgatcttcaccatagactggtttttcaacgtacggcttctttattatcttgccatcaacagaaagagtatcttcgtccaacatttttacttctggggtaggaacctctgtgatttctattccaaactttcgacgcaacttttcttctaggactttattaattttaggacctccatcacgagagcaaatcaaacgctgaggggtggaaacacgtatggcatcaaggatgttcaacacaagccgtctatcccaaagcaactcttggaatactacatcgtttacacaaaaaggtttacgcaactcgacatacttttcagctttcttcaatggaaatccactagagtagaaacatatcaaataatcacaagcaggccaattttccacagcttcgtccaaaatcatgttgtcaccgaatactatggcttcaaactcaccttctgcgatgattctgttcagaatattccgacatggttttgagcgagctttggcatccatggcacagattccaactacatttcgtttagtaggtgtaacgattgaggaaacaggcgacgccgttctggtagatgactctgtgtcgatagatgtaagatgacttgcattttgaatcatcctttattattcaactacgttaaaatatttaataacgcttaaaacacctttttcccacttgtattctttcaatggccaattccctcacttgtttggttatgagagatgtaggtacacggtgttagtacacacctagtcgatcaatgttacttgtacggttaaccttacaattcagcgaggtaacatttgtttacctaacgaaatgtaaataaataagaaattgttgcttaaatgaagtggacagtgaatattgaatttgtttcgcagtaatgcttctatgaataacttttttactaattatactgggttagttaatttgggttttcataaaaatttttttaaccaagcccagtttctgttattcttctttcaaaaacgtattcttccagtttagtaaaagcttgtaaaatccatcaatattaaattaaaaaagaattagaaaaaatttttgtttaataggtttttacttttcgtccgtgcgaaaacacgtggactggaatgtttaaattttacaagcaacaaacattaaaaaattacttctactagctgggttcaagagtatattgttctcgcaccttttacataaagaaaaatattttttaagaatttactgaaatttatttcattatttacaagcccagaattccaacaatcatagatttaccttaccactttttgatatatgtgaatagagttctttaggtattctgaagagaatgtagaagttttgctaacatgtttttacgattaaatcttacaataacattagacatcaatgtttagttctcttttttttttaataataaataatttgtttacttaaataaacggaacaatagcagaacgattcttatttataattaccgaaaattgatatatgacggattgaccatatcgttaaacacatttatcgatttcagtaaatacactgtcgtaaattaacgattattactgtaggtcgtaaagggttgctagaatttcacaaacactgctttttgcaagttacaggacaagagccatcctttgccattttacgtgctatttgtgttctttcctgtgataaaatgccatttgcagagaagaaacggaggacttatgaaaatgcggtgaagcctctaagaaaatctaggatctatgctcgtaagtcaaaattctctctttttcttttggaatgaacagattgctaactgtatttttagcctttagatccatcggtcacgtttccaatgcagtacctttcgacattgaggctcgtggaacccattttttggtaacaacgtcggtgggaaacacatttcaaacatatgactgcgaaaagttgaatttgcttttcgttggcaagcaattagacaaggaaattacttgtttaaaatcctttaaagatttcatgcttgtagctgccggatcaaaaatttttgcatataaacgtggtaaaataatatgggacattgatgtggagcaagaacatggaacagtcactcatttagatgcttttggtgagtggattattgcttgtacatcttctcgtcatgtttatgtatggaaacacgcttctaaatatagtgttcctgagcttcatactacatttcttcctaataccaatgcagatatcactagtttactacatccaagcacttatttgaacaaaatactgctaggattctcagatggagcattacagatttggaatttgcgtgtttctaaacgtgtacatgaatttcaggaattttttggtgatggaatcactagtttaacacaagcccctgtcctcgatgttttagctgttggtactattagtggtcgtattgtaatctttaatcttaaaaatggttcaatactcatggaattcaaacaagatggccaagttctttcatgttcattccgtactgatgggacaccaatattagcttcttccaaccccattggtgacctttctttttgggatctttcaaagcgaagaattcaaaatgttacatataatgctcattttgggtcacttccaaagatacagtttcttaacgggcagcccatattagtaactgctggtccagataactctcttaaagaatggatctttgattcaatggatggtgctcctagaatcctacgttctcgtaatggtcattacgagccaccttcatttgttaagttttatgggaaaagtgtgcacttcttgatttcggctgcaactgatcggtcattaagagcagttagtttataccaagactcacaatcaaccgaactatctcaaggctctgttatttcaaaggcaaagaaacttaatgttcgcccggaagaattaaaattacccgagataactgccctatcttcttcaaatactcgtgaaaaatattgggataatgttctaactgcccacaaaaatgatagttctgctcgcacttggaactggaaatctaaaacattgggtcaacacgttttaccaactagtgacggtacgtcagtacggtctgtttgtgtaagttgttgtggtaattttggtttgattggtagctctaaaggcgttgtagatgtttataacatgcaaagtggtatcaaaaggaaatcatttggacaaagctctctatcaggcaaaccagtcactgcagttatgttggacaatgtaaatcgcattcttgtaactgcatcgctggacgggattttaaaattttgggatttcaacaaaggaaacttaatagattcattagacgttggaagttccattactcatgcgatttatcaacattcatcagacctcgttgctgtcgcttgtgacgatttcggcattcgcattgttgacgtacaaacaaggaagattgttcgtgaattatggggtcattcgaatcgtctcaccagctttgatttttccgatactggcagatggcttgttactgcatctttagatggaacaattcgcacatgggatctacccactggtcacttaattgattcaatttctacacccagtgtatgcacaagtttgacatttgcaccaactggtgattatctggcaacaacgcatgtggaccaggtgggaattagcttatggacgaacctttcaatgttcaaacacgtttctacaaaggcacttcgccttgatgatgttgttgaagtttcagctccttccgtatctggtgaaaaaggaatatctgtggtagaggccgctctaaatgtcgagtctaatgctgaagatgaagaagatatatcatatcggacgatggatcaactcgatcccaacttgcaaactcttagcaaactcccacgcactcaatggcaaactttgattaatctagaagcaattaaggctcgtaatgctcccaaggaagtacccaaagtacccgagaaagcaccgtttttcttgccttccttaaaggatcaatcagaagcgacagtgcccaagcagcctatagcaactgagatttcaaagccgactgctgttgcctccataaaagtatccggcaccgagttttctactttattacatggaaacgatgatgatgcgtttttcgagtacttaaaatccctcgggccagcaaagatcgatttggagattcggtcattggatgcatacccgccttatgaagaatttatattatttatcaatattatgacacgaaggctttctaaaagaagagatttcgagctcgtccaagcttgtatgtccgtctttacgaagtcacacgaggacgtattactaatgcatgatactcccgaagatacggtacctgtttttgaaagtttgaaggcatgggaaagtgttcataaagaagaaaatcagcgtcttttagatttggtgggctactgttcgggtattttgagctttatgcgtacttaatacatctgcgtaaaaaagtggtaaatgtacaaaacaggagcagaaaaaaaagcaaattaggatgggaaattgttaaagttttaggggatatgtcattgcttacattggctgtgttcaaaaggttttatttcattagtaatttttgggtaaaaaaataaatatcttttaatggtaaatgacaaaaattgaaggcactatatagttaaaaaatcatagagattgtagcgtgcagaaagtaatgaagcacatatggaaattctgcaaaaccttggattcctttcttaataatttataacagttgtaagctgagactcaaaatgctcgggtgtttcaattttattgtctcgaaaatgcaaacgtatttaaaggaaagcactgaagtgaccaacatcgatcttctatttagtcatgcactctgctttcttatatttacgaattaccatatatttctacatcttttagagttagcagtataggataaaaatggtgataaattataaatttatatataaaatatacataatataacgttctactaactagctcccgtggcctaatggctagggcatttgacttctaatcaagggattgcgggttcgagtcccgccgggagctaatattaatttattttttcgttacaaaaatgcatgctaatgaaatcaatttattagcatgagtgaagaaatacgttttttttcctttccacaaaacattcacctacataaacacacctttcaatacataactgatctttctatttcgacaatgcacaaaagggaaagataagaatttctgtttaaactaaatgtaattgtctacttagtcactgtatactagtgcaaattaactacagagcaataaatgcacttgtcaacaataccgactaattgtcagctaatataggtttaacagtttatgtaaaaaatcatcatcattaaacaatagagttttcttccatagttgcaaatagattagaagaaacaaagaggaaatatgtccagtccatgcaaatcttggaaaaaggaatgtaagatagatagctattttttcaaacacatccagtaccagacaacaacacagtaaccggatgaaattaaataccaaaagcaacacagtttttagttaaaaaatatgggatccttaatatgatttcaaggtttcatggagctataatcacgaagaatgttaaggtgtgtattcgtaatctttccacgtcgagttttgggcttcttttgtttaggcgtttgattatgaccagcacgctttacggttgaaggatccacgctagtgggctttaaaccgtattttccaagttcagaagctaaatccaaagtgggtggaatgggaatctcatgccaaacttgttgaaactccttatcgacatgacaatcgcagctcttgtcatttctccataccattttaggaacgccatccttccttgtacgtaataaaagcacttctccctgtttttctagttcttcaagttcaacagtaacgttgggccatccgtctcgaagctctttgatactcataccaacgtgggttttttgtgaatctaaatatgctaataaacctgctcctgagcgaatgttatgcaatggcttaaaggtaaacgtttcatttctttcatcataataaatgcgattatttttcttcaaaagattgagtaacataggagtcaatggagttgacaggtaagaagcaatttcctcagccgttttaggctcatttctctcttttaaatactcaactgcatagtgtagctgtgataaataatgcgttccaacaccagaatcagcgggttgcgagtaaaccaaagacgtctttgagcgctttttcttcagggaatacgaccctggacttgaagcggcagaagaatgtccatcatttgaattcaaataagctgttggagtcggagaagctggttgacgaggttgaggttttgcataaataggttgatttgcgactttctttttaaacgaagataattgatcgcttagtgaactcatagccttaaaagtagttgttagcttgtcggaaatgaaactatcaaacggtgggcaaattctgttcaaaattatgacccaaggctttgttaacaaaatcgaacttatagaccgacaaccttgtaaaaaaatagaaaacaaacaaaatatttatctctgtttgcaaaatactaaaataaatttaaaaggctattgcttttaaaccaatttcaaaagtccccccaaaaatagttgtttggcagagggcaaggtttagtacctccattccacgcaatatgcgaaatgattcagttaccgtttattcagcgtctaaaatggtatgcaaatcttttaatatattaactgacaaataaagggaagagtatatggccctatttttggggtttttctttgtaatctttgaaaaattactttcatgcctggccttcatgattcacaatacgctaggcttgttttatcgatcagtagttcgaaatgagattaaaaaacgttcaaagaaaagatcaaggtcgagaagcgttagccttcaaagggcaaaggcaattcacgatgcagctgacatacgagaaatgtgcaaaatttctgggtattatgttgaggaccatctcgttagaacagaggatgattacatactttgtattcataggatatcgaaggattcccctggaagaattggttctcctcatcccaaaaagcttccggtcgtttactgtcatcacggtcttttgatgaattcggaagtctgggtttgtaatgtagaccccagaaattgcctagtatttgatctcgtaaataaaggatacgatgtttgggtaagtattttgctgcgttcaatttatcatattttaaataattagttactggtaaagttaatatggttttcgttcgagttttcttttttaaaaattatttactaattgtgcttaagctcggaaataatcgaggaaataaatacagtcgtcaacatcttcgcttcgactctactgacaaggaattttgggactttagcattgacgattttgctcaatacgatattcccgataccattgactatattctaaaaacttctgggcaaacaaagctcacttatataggattttctcagggcactgctcaagcttttgcttctttgagtatccatcccctgttgaatgacaaaatcaactctttgatagcgttagcacctgcaattagtccaaaaggtttacataacagagttgtagatgcctttgtaaaagccagaccttccatattatttttccttttcggacgaaaatctattttgccgtctgccggattctggcaaagctttttaggtacggtttttttcttttaataatttcactgacatttttatccagctccaaaattttttgatgcagtccttgcatactgtttgtctcagttatttaactggtcttgccaaaacatttcttcctatcaacgcttggtttcattcgcccatttgtattcatatactagtgtaaagtgccttgtgcattggtttcaaatcatgagaagcgcagaatttagaatgtatgataatgaccagcttggtcatgactatttcctcaaatattacaaagctgccaaattccctacaaataatattcgcacccctatttatcttatttggggaggcagcgactcactcgttgatatccaagcgatgttgaatgctttgcctgcggaggtggagcatgttaaggttgatagctatgaacacttggacatgatttgggcagacacagttaaagattatgttatacctcctgtactacgaaggcttcgtgacattcaccatccaccagagcatgaggagaatgataaagaaaatcgtgaaatccaaaaaaatcatatcgctcctaggaataaaccaatttaatttgattgaattgaaagactttgcctcaacacatcttttgtatatttattattagttaatgttttctacgttactattttattattgctagatatcgaatccctgatgttatccgtttgttcaaaaaaaagagagaaaaagtttcctaaaggctaaattttgcctttttttactgatgacctgtttgttctcagttttgtgattatttacgcttatgcacaccgaaaatttcatctttgaatactttgaagtgtttgtattttttactgtcattaacaaaaccgcatttgaagtagcaggttaataataatgactgttaagactgcggttcataaaatttaattattttgcttattgtttttttcaatttcttctgtgccccgattaattaaggtgtatccgacaaccaaggtttggatgctcgattatgtaggcaacacaaaaatttacatgatatggatagatctttcatagaaatacctctaaattttgatgaatttactttagcaagaaaaaaaaagaatgcaatgttaaaaactgttacaataattataaatatacaatgggtaccagaagtcgctatgaaaacatctgaagtaataagattacgatcaacaactcaaaacgtgcaaatatactccaattatactaaattcctctcttataattgatatactgatattaattgcctcctcaaaatacttagcaaacgcaagcattattccaaaaaaaagtcgagacgaataacgagctagaccactgttggcatgcattttaaggcaatgcggtatacaaattcctcagtatatcaaaataaataacattagaaagaaagtactcatctgggaattttttttttttaattcacaactatatttaataaatattttaaattaaaatcagtaaattgctatgatgaggttaaaagaaataagagacacgatttgaattgtactgttatcgaataatttatcaagttagcatgttaaagtttccacgacaagtacccaaaagtctgactacgtgctattaaagctagctaatcatataaattaaaatcagccaaaactcatagtcatttcacaagtttctcttttcagccattgtttacatatgaaattttacttagtctccagaacatcgtttctaataccctaacctaaggtaaaaaccgtcacaacaaatttactatatatagggtctgttcagttgatgattcaccatcatcagtaggttttaacttactttgttatataagtaaagtaaaatcaatcctgaagtcaagtatgatggttggagtctccggaccaagaaaatgcatccgttccgtcttcagcgaagaattgagtggctttcccggtcgttgacttttttccatgggtcaaggatgggattgtctcccagacatttttaattaaaaaaagtttatatttgattagtttagatacgtacccaaagtttgcaatactacatgatttgtttaataaatttacggtgtactgtaaaacaattcgtagagccaacagtataaatatcccattgatggctgggttcaatagttttatttttagtgtaaatataatgacaatctgtttatcaaagtatactgagattataatatttgtttttgccaaatggttttataattattagagcatgataaagacgatgtttgaggaattcttctcactatgaatgtctgttttcatggagacgtggcatcaagtaatggtttttagaggcatgttcaaatttgttttcgctcattgaaacttgttttctatatcgctgttcatgaattttattttattttttttttatttcagacttaagagtgcgctagatttatttgggcatctttaaataatgtaaattacttataactccaaaacttttaacttggcaatctagtttgggccattgtgtagttgcccaaaacatgtcagaggaagtagtccaggatgcacctctcgagaataatgaactcaatgccgagatagacttacaaaaaacaatacaagaaggtatgattaaagggaattcttcattaatatatattattatgccgtaattactgacgattatactcgtttcagaatacaaactttggaaacaaaatgttccctttctgtatgacttggtaataacccacgctttggaatggccttctttgacaattcaatggcttcctgacaaaaaaacgtacgttgcttgccaaagtagttaggctatgattatactggcctttacttcaaaccatctcatcagttttctaactcgattcttgaagaataccaggtactgattactctattcaacgtcttattcttggcactcacacatctggtaatgatcaaaattatttacagattgcttctgtgcaattaccaaactttgatgaggataccaccgagtttactccttctacgattcgaagagcacaggccacgggctcgtatacgattgaaatttcacaaaaaatccctcacgatggcgatgtcaatcgtgctcgttacatgcctcaaaagcctgaaatcatcgctaccatgggagaaggaggaaatgcttatatttttgatacaacttgtcatgatgccttaactacaggtgaagcacttcctcaagcagttttgaagggccatactgctgaaggttttggtctttgctggaacccgaatttacctggaaatctagcaacaggagcagaggatcaagttatctgtttatgggatgttcagacacaatcttttacttcctctgagacaaaagtcatttcccccatagccaaatatcatcgtcatactgatattgttaacgatgttcaatttcatcctcaacatgaggcattattagcatcggtgtcggatgattgcactttgcaaattcacgatactcggttaaatccagaagaagaagctcccaaagttattcaggctcattctaaagccataaatgccgttgccattaatccctttaatgactatcttttagcaacagccagtgctgataaaacagtagctctttgggacctccgtaatccatatcaacggttgcataccctggaaggacacgaagatgaggtatatgggttagaatggtcacctcatgatgaacctatattggcatccagttcaactgatcgccgtgtttgtatttgggatttagaaaagattggagaggaacagactccggaggatgccgaggatggttctccagaattactatttatgcatggaggccacacaaatcgcatctcagaatttagttggtgtccaaacgagcgttgggtggttggaagtcttgccgatgataatatccttcaaatatggagcccttctcgtgtcatttggggtcgtgatcatgttcaggtttctcctagggatctggagtaaagttggccatagaaaaaaacccaaactcacttttccatccttctacgcttcatctgttttttgcaatattctttacaatacagagtcatatggtaattgactgctctctttttttcagcttttgtataatttaaaacaaatgatcttcgtcgccttgtaaatacatcaaaactactgttataaatcagactacatttctataacaccagagattaaatgttttgtttgaccatgataaagtaaaaaggatagtaactattaatattatacataacagcaaaaaaaatctattgaacaacaaaagggggataatatatctcaaacttgttcattttgcaagtctgcgaataggcgtttgtatagtttcttcgaaactttcgttcggcgattaagtaaacgattattcaggtgagatataaaattggtcatagaaatgaaaatgtaattttgaccgctggctgcgagtaaataataaataacaccagcgaagatcaaaaagttctggaaacttttggacgtaggcgtaagttggaaaagtttcataaaaaagtttttatgattttgaagtcgtattaacttaacggtcaggatcaacaaaacaacaacgacagctgtaaatgaatagttcctccaaactttttctctgtaaggaggtcctatgctcaaaaccactccaataaaaatatattggaagcaagaaattaaaaacagagcagttacatcgctatttgtaatattcgtatctgagctattcgcaggtggtggtatataccagggctctctccgtactatccttaaggttatatattgaattatacaaataaggacgatttgaccgattagaggagataaaatacgtttggaaaccaaattagcggtaggtcttttgtgggccaaacgatgataaggtcgagatctccccatgaaaaccgcaatgggaagaataatgacaagatcaataaacaaaaactggaagtctccaagatttgaatttgttgtgtacaatatactgacagtgataaattgaattgcagaatacaaagccatatattggaaacagctaaagcttgtgactagagcagctcgcccatctttaattacgtcaagtacacaggtaatctcaaaccatttactagtgaatggagcagcaactgacgcttctgcttcagaaagagatattcctacatcggctgctttcaaagcaccacaatcattcgcgccatctccacaaaatccgacacaatagttcaaattttggaaacacgagacaagctcattcttttccgatggtgacatccgagcaaaaatctgtgctttcagtaaaatatggtgaaaaacatttagaggagcataatcaactaaccagcgaaacacatcaccagtaagtgcaatatggaaatccttaagtctagcaagttctatagaaacaggctcatgatcagcgaagtcaacattcggacgcaatgtatgaggatcaagaaatatttcgttattttcaatggcctgccaaactagttgacgagatgcttcatccgcagattcactctcttcatcaaagcgaggtaaaaatacatagccatcctcgggaagcattccacagcgttttccaacacaaatcgaagttaaaacgttatcaccagtacacataacagtccgaatacgcgcatcgttaagctctcgaatgacggtagcggttgtagattttaatttattctcaaaaacaataaaaccacagaagtccaaatcgcattcaacttgctcacgcttcattcgttgtgctttagcccaagtacaattttctagctgcttagaagcgcatgcaatcactcggaagccgttatgagtataataatccaaaacctcttgatagttagcaggaaaagattcaggtttacatatgctaggcataatctcgggtgcacctttgacataagcgtccatttttttaaatttgccatgcttcactattacagccatgcgacgcaactgggatacaaactcaaatgttcgaacaattcccaactctaaatcactttcagtgtaattgttcgatgggctattccaaggaggagaaacggtgggaggaatcaattgctgtgtcctaacgtacgcagcgtcttcagcttgttcagaagacattttcttgtttagaaagttttcttcagaatagctccaatgagtgaatttaaacatcttaatatctaaagggtcaccaacgagttcaccatcaacgtaacgaagcatatgacatgtagccatcgtgtacaataagttagaaggactatcatttgacaatagatccttagaacaaagattgccagaatttgatctcaaatctcccaattctgatccctcaatcaccgaaactcccataatatctaatccatcttctgtaagggtaccagttttgtcgaaactaatcaagtctaatttaccactgacgtttactctctggggactaatgcaaaaaatgccctgctttcggagacgagatatcgcaaacgtcgttccaatcgtaagtgttgcaggtaaagcaggaggaactacaattgttataagatccaaagcacgaatgataattgtggcgattggaacacctaatgtcaatagattgatagagctaaaaacaaacccaatcaatgcaattataaacatagctgtaatgaaacgaaaggaatcacggtaaaaactaaaattggtcggcttagggaaaatcatcgaacgaacgagagcacctttagtagtgttaaaaccggtgcgaacgaccatagctaatgaagcaccttcttctttctcattgacaaagggtttacggacttgaataattttagtgccagagaacaagaaatgcttgcaaagcgacgcagggatattcttggagaaggaaaacagctccttcatactttggtctgtggctggaattttggaaactggaatagattcgcctgtcaacatactttcattgacaatgcagtcaccactaagcaaaagggcatctgctggaaagatagttaattctggatcggatatttcaaagacatccccaatgactaagtcggtagatgatatacttgtccaaaaaccatctctgtagacgcgaacaggacatgtgaaacgagacatttcacgcattcttcttagtgttttcctggtttcaataagactaccaaggatgctaacgactgaaataatcaaaatacaaatcgcataataatagtaggagtccatggaccaaaggatgatcgagaaaacttgaaagatataaaatggatgaagcacttcgtcaatgagaagttgagaaacactttttagctcaagatctataagattttcgccaaaaatgcagaggcgatcgttaattgcatcacgttccaaaccttccttcacaactgaagtatcacgaatccagcgaggatctttccaatcctgctggattaaaaagcggtcaagtaggggatgaaatattagtttcatgtagcggtaattaacgtaacgaaaattttcaataaaagggtcattttccgtaccttcgggagcggcaactcgtatagatgcaccaaatatagaagacaatgaattttcatatggttgtatctggatgtctagtttagaaagttcaccccattgggtttctatggtgagccagtctgcggtagcaaggggttcacgagttccaacaaaacgaatgaaatatttgggaagccaacgaaaaattaggtacgccaaaccaagagtaagtaggcaaatagcttgatacaaacgataacggcttttgttcgttttgtatccagcaatgcctacttccaaatcttcttccacaaggtacaaaatttgacagcaaccgtcttcactcaatccagcagcttctcctacagattctctacgtaagaccggatgtatattcaactcttctaacatcatttctgttatttcctcctcatcactataaacacctgagccattatcacgaagcaaactctggtaatccctactagcagctatagactccccatcattataccgattaagattgtattccgactgtagatagtccatgctaaattggcttacgctggcatccgaagagggccttaaagtttgatgatgaaagcttgagacactagacggaatgctagttcctaacccagggccatcgaaaatactatcatggctcatcaatgatgatgccaaatacgaatttaacgaattttttgaagcaattgaggatgttgacctcttgcttcttatcatcttcggagatgccataatgatttctccactaaaaaccccttcaatctccctaaattattgattaaaactaatttactatgagattgcaggatggtggtagtgaataggtaacccatgaagagcgttcgaaaatactgagctacggaatcacacattacgaagattgctacaacaaaaggtgagaactttacaatcataagtaaatagaacaataagaagtatttgctttaatagaagtaattttttttattgatctgctaaggaagtattttctataaattagaagaaggctgctcgtaaacatgtctctcgcgttaccgagaatacttatttcacttgtcccttcaatgaaaaccattttctaggaatttatatatttcttttacgactgaaaaacaaatttatcatctttaatatcaatttcgtaaactttatgcatcaattataatgtctgcgacacgtaaacttgaataacatccagttgcttttactccaaatccaactggtttgtggctgcgggaggaccagaaaacaaggagctcataagattggctagaatgtttggttgattgctaacagggcgaattccaaagtagatttcttcaatctttgctaaggcctgtagtaaaaaaatttgttagcaaaacactttagaaataagaaaaaatgctaatatgtaaatatatatatgaaaaaaagaaacatttttcttataaatgtaacgtacagcttcccaatcttgctttttaggatacttttgtaccaatgaaagatatgtctctttatctttgcgatatgccgtaaaaataagtaaatgtaagaaattcatctggggatactctttaaaaacaggaaaatctttaccatcgaaactcatgttctcaacatcaggcgcattcgatttagtaaaatgcttggtaaatgtctctagtgagttccaagcagaaattaggttttctgccaaaagataatttaaaacaggtcttccagcaaacgtatcaggactgatcgaagaatccgacgtaaaccaatagtacattgtttcaccatatgcgcgggcgctcttttcatttccgagaacaaagtgcttctcagcgctagcgggttctttccctatattatgtgttaaaagcaaagcagattacgaaaagttcgtacattttacaaacatagtagctaccgcaaagtgaacgtccttgtctccttgaggaccggcagatttgctccatctattcatcattagtaagtaaaaaaaaagacagtatgtaggataaaagggcgaagaatcgatcgttatcattcacgccgtccatatataatccatacagataaataggcacttactctaaaagccttttaacgtattgcttccttgcaccttcttcggcaggaaaaagtcccaaaagagtcaaagctcgggctgtgaattagtataatgaagtttaaaaatcagagttaaaattagctgatgtgactagcatacctttgttgtcaagagaggcagcatatgaagctttttcataaacatctagcatgtatatcgctaggtctgcggcacttccggtttgctcgatttcaaataatgttttagcgcccgaatatagcaatgcaactgcatcgtcgtgtttcttagctttcacctgtcttgctcggttattcattgatcaataacaaacaacctacctatttactagagtgcgaagcatttggtgaccttcatagggatcctctcgtaatctaaattgtcaataataataccttcatcaatattcgtaattcattaccttccttcggctcgcttgatttttgcgtccatattgtttattatttataaagaaaaataaaaataagcgtaaaaaaactgagtaaacgtgaattgctatttaacgcttctcgcactaagtgttgtctcagggagcaagtggtcctgcccatccccgtatatacctattttagcgaaactacctactacagttgaaattgtgtatttcatctttcaatgtatttcaaaggatggatatagatgtcttggagtttgtagataaggtaagagaatactgctgagttgtaattgataaattggtagattgcttcaatcgaatctgccggtgacaccttagatcggttgccccaattaattagcttggcgtgtgaaaaaggacaagagactcaagtttatgaacggctaaatgaattggccagcaaaagcgcgatacgcgttgaacagctctctgctgaaaacaaccaggtatgctagtctcctgtttccctaaggtataatcttacaattattaggattttagcaaatcggtaaaccagttatctgtagttcggtccgaacttcgtagtttgcaatctttaatggccgacctgaacactgacattcaagctagcggtcgtgatttacaaaatatggtgagcaattatattaagcgtggctctttcaacttgaagaaattgagcttgattaaattcttgaattttgattacgcagaaaactaacaattgtatcagaaacaacaattaaattctctaagcacatccgagagatttcttacaaaatatcataatttagtgaggagctgtatgcaagtgttgcatcaggttcagtactctcaagagttattgagtaaaaagcagtatcttcctacactcagaatttgctcagaaataagcgaagtgcatttaaaacgtttagatggattggggatgtattctaccatccaacaatacattgtcactaccaaggaagctatatgtagcgctgttatggaagacctgcatgaatggcttttcagcattagacaaaaactacctttagttggtaaatcatgctcacagcaaattgatgaagccagaagacgatgggctagggaatacaaagaggatttggttaacctaagctccaaaacctcaatttccctagaactatatttgcttgaaatgatggattgtatgtttacgttttgtttctgttttgttaacattttcagtttctcccttagataacgagatcgtcaagattagctttgaacctttatatatatgcttgcaagttcattcttatttgggcttgctcagctctttccgttcctcatttgagcgagataggagacgccaacaagagtttttagcgcctaaaagtctgaccacgctagacatggctgttgtcagcgaatggttaaattctattgctgggtttatgatagttgagtactacatattacagtgtatacccaattttcgctcttacgaagaagttcaaaacatttggactattatttgtgaaaagttggtcgaaacaattttaagtgttgcgtttacagagcaaagtaccactacaataataaaactgaaaaatcaaattgttttgcttatgcataccatggagagatttgggttttccgttgaaagtttgcggaacttatgtgtcgagcttattgatgcttttggtggagcccttatattgaagcattctgtgttctttgaagaggcgtttgaaaaggatgtgtatgctcccatgatcgttgagacacaggaggaatatgaccattatatagcgccctattggaacttcccctctgaacccttcccaagaacaatgagcttttcaaagatgtgcccactatgttgcacaactctttctaaatttgtccgtcatttcttcatgttcttaaatgattctgtcatattggctaccgaagttaatgaaaaggcaccacgattctatagaaggtttattcttcgaagccttgttgatagattgaagagtttatatccaaaacttgcactttctcaaatgtctcaacttgttaaaaacttttacgcatttgaagatcctttgttacaaatagagaaaagcctcgttttaaataagcctatacaccagattggtgcggaagcctcttctagtaataatgttaaatcaactgaattacttgaaggtttagcgaatgcacgaaagtctgcacttcacgaaatttttgttaaaataaatttaaaaatcgacgactttctcggcttggcagagtacgattggacgactactcaggtccgaaaggatgttagtggatatttgcaagaaatggttacatatctccaaaccatgtatcttgaatcgcttgcaggtcttccaaagcatgacaagtcgtacgtgtatttggagactcttgatcatctttgcactgctatggttgatttgttgtcagatccatctattcgaaaagttacgactgctgccgccgagggtttcaaattggacgttgagtatttagaaagttttgcagctcaagtacctgatcaaagcattgttaatgccgacagttttatagagttacgacaatgcgcaaatctgctgctaggagataatatggaggagtatttggatacggataagtttatgagagacttcaatagattgcaaccagcggttgctatcaagtttttagagaggtataatattcccgcatgtttacaagataattttactaaccttttgtgcaggcatattaataattattctgctaatccccttagcaatgatcgaccaaagcgaagggccattgaaattttaatagctactttgaagaaaagatagcagatccttcaacgataatttcatttattgatatagttaaatgtgttttcggggaattaattaactatctatttcactcatttgactcatttcatattttgtccagctgatggttctttactttcacttttttatatgagcaatgcggatgagtgttcatttaagccttagaggaggaaaccttttaatttcgtttaatttctcctttttttgagaccttaactgaactcactacaaacacctgtcccatgacccaaaaaacattaatgtacctaagctattgatggaagctagcagtatattgcttgcaataccagtaatgatctttattttgttcaatcaatgcgaaagatagagaattaatttacttgagaaaaagtataggtcgttatgcttaccaattgcctttttccattgtacaaagctcgttctcgtaatttttacatttgaacccctaattgatttatttttctgtagatgttaatttattgttgtaaaaagtccattttttacaaacctagaattctcttctttcatctcatttatattgttgctatatgtgttttcaggccagcgactcactctccacaaaccaacctcaattcattttcgaaatatatcatcatgtttttgggcacattatattctttcaaaactaatacgagaactgtttgccttttggagttggctaaactccttgatctccaagttgatcttgttgagacttatcctcataaattctctgcagatttggctgcaaagtttcctctccaaaaggtatgtaattataaatttaatttaaaaaaatttttggcaatataagtcggatgtcgtgtattggaatctgtaggattttaccgtggtttaataagtggagggttttataacgttttgcaagtctgtttccaattgtggcttacttcatataaatgccaaaacactgtttacaaattattaaaattcgacatttgatttgaaatgtgacatgctaatattcgttcaccgtacttattttacgcataactttttagggtaatattgactaattaattactagctccctgtcttcattggtgctgatggctttgaattatctgaagttattgccattgttaaatatttctatgaaaagggaaagcacaatgacaaggaaggacttggtcctgtcaatgaggttgaagaagctgagatgttaaagtggatgtgcttcattaactttgacatcgtaacgcctcaaaatgtccgcccttgggttggtatgttccgtggtaacatcccttacgaggagaagcctttcaaggaatctgccaccagagcaatcgatagcttgaagattcccaacgaacttgttaaggatcgtacatatcttgtaggggatcgcttcaccctcgccgatttattttttggaagtttacttcgtatattcttcaattccattattgatgaaaaaacacgcaaggagcttcctcatttaactagatattatataactatgtttcatcaagcaaaacttgaaacatattttcccttggagttgcctttgaccgttactgtggccaagaagtaaagagatttagcgctgatgctcctgctactattttatataactccaataaaatgcgttctttcacaaacgcgtgatttaagatagaagattgaaagaaaaagagaagctatggaaatgtaactaatctcttttattaatagcttaagtatatttcaaaatagattgctcacaaacctttagagcaaaccatcatcattgtgatgagctatacttttaaatttttaagattctgagatttacaaagactcttctaatgaagtaagtaaaattacttttataaaataaattgtaattttttgtttaatttgggattttgttgttcaacttttaagacaagctcatcgtaagtttcatattggtcacctctaaaaatcttcggactttttgaactcaatgggtcgcgaaaaccatttactgaattcgctcgataagattcctagtagagtcccttcatcacgggttgaacaccaagtttttgatttgagagaatattcataatgtttgggaccactggttttaggttagtaccgattctaacaagactaaacttggatgctagtctaatataatgggacttaaggtcataattatactaagactaaaaatttcctttaagcactcgatactataggaaacatgtttggcaatagctgactgtacctaccttactggggatgaaagccaaatttgatgagcaggaggctgcttatttattacataagtccccttttcaccaagcataagagtaattactccattctgcaaatctagtgttagaatcgtttcaacacaaactcagctagactaattgtaatgtttgggcaactctgttgacatacagcatattgaatatcataatctttttttcctacttcttctaataaatcctcaaatgtatcatttaagacatcaagggtgtcatctgcaactcgatgatactcaagatccgtcaaagctccattatgccgtacttgtgaataatacctacagcgtagcccaaaaacattagtcgagaattcataaggcttcaaaaaaattggggttcgtctgcgaaaggctgctcgcaaagactgcatatttcatatcacggctctttcacaatctctcttgtcggtgtaggcttaattgctaggtacaaagaaagaaaataaatgatatttttcgataaaattatatgtcaataattctcttaattgcaaatattacaaaattactcttcaatgagtagttagcggataattcgtgtgttcgcacttggatcaaattacggtcgcaaactcaagaagtgaatttacataaagaaggaattctgggttttgggaaatatgctgtacagaacgacttagtccttttcgaataaagtatttatatctaaacggtttgaacaattgtactttaaggtacatcgcttcaacactcatccataaaagggtaatgatcttaattgagttgcaattagtagaaaatggaaaataaattaattaatccactaacaaaaagttgtccatttaagctaaacaaagctaaataaataataaagttaactatatcattaaatgtaacacatcaacttaagttaaaaacaatcatttctcaataatttgaccatcgtcaattccttttataatattgttcggaacaagcgtaatagtcgtgtaacaaactttcaggtggatttgagattttgctttctcgtctttttatgtcatctctcagccgtatgtaatttcttaataaattatcctgatcacgaggttttcgaaagtgatatttaatagaccatgtttccttttcatcaagatgtttgacaacagacttgtgaacaccattcacaaattgtagggcacaaacttctaatgcacaaaaattggaaggtgacacagttttggcttccagatttttctgaccatccagtaaatcaaaccccctgttttctttatcatctgctacttctaagtacacttttaaaggggggttaggtacgtcttcagtagtagaaagcataactcgaaatgaacgtttagggaaaattgaagttgcatattgcagaattttttccaacaattgaagatttaaattaaattccgcttcgcctatttcactgcttccatgaattgctcggtccatcgccacaagcggtatatactgaaaaccaaaaatatcgcttgtgttatgatatgcaacgaaaactccttgcatgtaaccaagtctggcttgcagactatacttcataaaagcggacctaattaaatcaaagtactctcgctcgaacgagattcggtttccataataatgcgtaagtttataactcttgaacaattccggctgtgtctgattcatacgaaccccaaatacagctctcgtcttcaaatcaaagacgccagattcaggaattttcttatcgtaacaatccagttgagatctaaccaaaagcgaagaacatcgaccatactgaaagacatcctttaaaggcttcagtacaccgtttgaagagggaggtttcttgtataacaagaactggtctttatcaacagtaaaaaaagtctccaacgatttcccaacgttcatcaatatgatgttgacagaaggttctttggtcaagctcttgtctttgtctatacaataaagcccgttttgataacttatgtgtacactactagccgatcggcataatcgtgtaaagttacgttcatttggactaatgtagaatccttttgacagatctgaaaaattcggaaatttccatttacttataaagaagtgtaattgagacattaagccagtcaaagaactagtggaaccaacaaattcagcaccgatagaatttgcgactttttgtaattgttcatcttcggaaggaggacgaaacttacttaaaaggccaaaattaaatttatcaactggcaagatttttgacaagtattcatcccatttatagtcattagtcttcggatcacgaagaaactggaatttctttttaggtaatacagtgtccaaatggtgctgtaagttgcctattgactctttgtccacaacgttgacttctacaaaaataaattagttagtctgacttgcagcgctcaatatacttactttcaaaggcagacgctttagagtgtaaaacgttgtctgcagctttaatattacaactattaatttgaaaacctttatgtaagcattttttcaaattataaacagatcgacgaccgaaattcttttttttataaatcaacataacaccaattggtaaatgtcgagttatacttaatggtttaaatgatgacagaaaatttaattcaaaccaaaactaaggaatacaaaaactacctccatatctttggaagtacgagggttgggtgaacttacggtgttgagtacttcgcaggtgttagtatatgaagtcgaaaactagtgaaatgctattgaaaataatcgagcattaattcattaaattactataaatattcattaaataatacagaaaatcattgtataattggaaatgttcagagtttagtcagcctaatatgttagtactcgcctttttccactcattaacgacccattcaaaattaacaaatttgggttcaatttgatatctatttggttaaccaacaactcatacttctttctttttgtttagctacttacagttcgcacgcctttgttagttgttctaaacgagttgaatcttccacaaacattaccacgtgtgtcaatttttttgaagaaatatctttctctattgtagctccgttccatagcaatatacatttggttaagcggtattgccccattcgaacatcatacaactcagaattttcgattcctttcaaatctaagaatactgtaaactttaaaaaaggaaaggcaccaacaaaactggcttcttccttcgaaattgtaagattcaaaatagaagtgtcatcggaaatttttgagtactctttactcaagtccagctgtttcaattccaccaataaattagacaaggatttcgcactcaaggactccaatgctgtcttccatgaatatttttcatctttagaaaagagaagactaattggttagagaataagcaaacttatctgtacttactatgaccattgtggcattaagcgttgattatttacactgtccattacccattgagatcgaataatagtacacatgtttttgctccgctcgatagaaaccctagtagatactgttgtaagcaatgcacaagcaaagtgatatcttacctctgtcggcaactaaaaataacctttctttcccaaaatttccaacaccctgatgaattaaacctccgttttcgattattatttgttgcaaaccggctttagtttcatgcaattctgttggaggcaggacgactaaagagttagaaaatgtctaaacataatcacctaccaaaatgtaagtttttcaatacatcagagtgaggagaagcttcctttttaaacgtgggttcatcataaagaaactttttctgcttttctcttttttgagacacttttctttttttattaacatgaaaggaaacgttatcctgtttttcaacagcgttttttagcgtaaaaaattcattgatagtcaatgcgtctttccagcttcgatccagcctcactttttctagtcttggaaatcttaacgtatagtttgtcttaaaccgatctgtattaagagattagtatataaagataacacaaatttatatcatactagatactacaacttccgcagctttgatttggagaactaatgaatccttcggatgaatccacatatcaggcttttcaaagtcttgtttagtgccagccaattccatatattctaaagcatcagaagaccaaggaagccattttccttctgtctcctttcgaattatatcgcgatcaaagtaagtaaatccaccacctacacgaacaaatgactgaaacttctcagaatggtcttttggagtgtagtccatgcgtagtccacaaagaaacgaatttatttttcccgactgcttacctcggccaaaatacccgcctaaaataaggcaatccaaatcttctccgaaaccctgaagatagtaaggcttaactttgatccagtcatccattcgttctccaaggtgataacttccacttggtttcttgataaccaacccttcggatccttcttgaataacattccgtaactctgcttcaatatcttcaatagtactgccgaccttgtaaggtagaatactcatacgatgagattcgcgaacaattactttctctaatattcgtcttcttgattctaatgagtactttaccaaagacttcccattaagatacaaaatatcgaacacaacgtaataagggctgtaggatgaatgagaggaagaatcttcaaaaatgcttcttaaacttccgtatgggatcactgtttccaacactggatcccatgtaaccatttctccatcaagaataatttgtgaaatacgtttgtcaaatgctccaatgatgtattgtgtcagcctagattgttcatcgaaataactagagccataggcataagtgtacgacctggcatttcgactatagaattggaattttcctgaactcatgtgtaattgaatacgctccccgtctagcttttcttcaatccaaaacggtttatttcccatggcttccagcgtttgatggagatccttttttttgaaattggctagctgaggctggaagcaactaaagacttccacatctgtttcagtttcatcaagagaccgactaggatcatagagctcccaacaaattctctttaaggagctacacagtcgatataatcgagctgcatcaggatggaacacagaaagtatgaatttttccgatgttccgtattttcgaactaaagaaataaaaaagttaggtcataaataaagaaatatcatttccaaccaacctttcagtaaaatgggaattagccatcgaagctcaagaggactcaaggatctataaaattgctccaaaatattaactcgggtatcccttattaaggttagatacggtaaaaaatttagaacatactcagaagaagcatctgctaattgatccagcagggcgttgacatcaccaactgtaaaggcaccaggaaaggtcctgtatgcccttctttgtaaaatatctaaatttttttcagttaaaatatgatcaggatcaattggaatacaaaaactatgatgaacacaccctgcaacatggtagaaaaatctccagtatgtttggactcggatcctctccaatttttcaaagattttgcatcttcagaagtaggactcaaatgcatagccttgttaattagtcactgatgttgcaacttaattacttactcgaataaacagttttccaagcccaaattccttgaacccatatgatcctctttcacgatccaactagaaaattagcaattagaaattcaagacaccgattaagacactttatgtaatgcgatttagtggtctaacaattttaagtcgtacatcaggaagcactccattagttagtataaggaataaaatacaaatattaaattacttagtcgaagtaatggataaagatctggtcctacatgttgtcgccatttattaaagtaatccaagaggattttgcgctttaattcataagggtcaaggtttgatgttttggatttcctagtctttccaattcttgataacggttccaataatgttgtaacaaaatcatagaattcaagggtgcttgaatgattttgaggtttcgtaaataccgtctctttggcttcgtccatatcttaggttttggcttgaagcaatcgttttataatacagtttatgatcaataatatttctcaaataaataaccgataagaaataaacatcaatttagtctcattatcgtggtagtgtcaagtgtgtagtacgaacacttctaattatcatacatgaaagcctgttctctgcaacgattcggtggacagtatgtttatggagcagagagctgttttctaataagttaggtaaaatgactgttctgaatactacagataagcgtaaagctgatgataccgttaataaacttgacgggaaattaaagcagccacgtttggataatttttttaagacaaacacctcatcgcctgctttaaaggatactcaggtacttgataataaagagaacaactctgtctcaaagttcaataaagaaaaatgggcagaaaatcttactcctgctcaaagaaagctgttacagtaagtattgcttacaatgtaggctagaaaattggaaaaggttgttaacctatttagactagaaattgatactttggagagttcttggtttgatgcgttaaaagatgaatttttaaagccatattttttgaatctgaaagagtttttgatgaaggaatggcaaagccaacgtgtattcccgccgaaagaagatatctactcatggtcacatcatactccacttcataaaaccaaggtcattctcttaggacaagatccttaccataacattggtcaagcccatggtctttgcttttccgtacgtccaggaattccatgtccaccaagtttggtcaacatatataaagccatcaagatcgattatcctgattttgttattccgaaaacagggtacgttaaaattatttagtctttatattttttctttctaagatttggctttttgctaatgaagcaggtatttagttccttgggctgaccaaggcattttaatgctcaacgctagtttaactgtaagagcccatcaagctgcttctcattctggcaagggttgggaaactttcacttctgctgtcctgcaagttgcgttgaatcggaatcgcaagggtcttgtaattttagcatggggaactccagcagctaagcgacttcaaggtcttcctttgaaagcacactatgtacttagaagtgtccatcctagccctctctctgcacatcgtggcttttttgaatgccaccatttcaagaaaaccaatgagtggctcgaagagcagtatggacctgaaaaatgcatcaattggagcgctgtttctgaacaaaaagcaaaaataaagtctagcgagttggaatcctcttcaactgagtagaaaaagtcagaaaataattgctcgtttactggatgctaataggtctaatcaagctttttattttcttttgtcatgcttgctttattataccacttgcatgcttatctttattctacctacaattggacttgcttaatgtgtgttatttttctatgtctttcttttcgcagaggatttattttttttttgtcttaacatttaaatcattcattttaaagtttaatatttatgtcaaatccatcgtaaacggcacatttattaaagacttaatgtaatcagtggtaatttgattcgttagaataactcagtaattttctggcttcgattgaagttcggacagcagtttggatgcttcttagtttcccaatacgtcctttttcttttgccctgagatagtccaattctctttttaatacttctgtatcctgccttgccttggccaccatttcgtttgcttcagtgaacagtgaaaccgataaatcttccatttctttctgactttgctcaagcaatccttccaactcttctcttcgttgaacctctctcgaaagttgttccttcaaatgggttattgctaaagtattggcattgtttaattgtttattcgtgctttcttttaaagcattttcattcgaattttccttgttagagatagagctaaaaagctttgaaatttctacatgttagaaaaaattgttttatattgtattgtcatgttgtcccttacgagaattgctcatcattgtttcaattttttttcctttcctataaaatactaattgctaacttttttttcaaaagtacagtggtttaaagttgtttgcttagagaaaatgtcatttgttgacacagtacatatggctgttaaccgtaatataaatgacaacaaacaggagaaagacttcgttaatgttgaagaatcatccgtttattatttttatcagtttgctttgtttcttttttatttatatttttttgcgtgaattttatgagcaatacattcaatatacaatttatggaacattgaatcaatttcactgaagaaataaatttattttatcaatttcatacaaaaattttttttacccaatacaggaaagaattaagtgagcctcatttcgttttttacaacaaaaattatcgaacaataaacgaaagaaacaaaatgtaacaatttctcggtccttgatttcaaatcaagatacttgagctataaagatgctttgaatttattatcatattctatatgagcttcaagcatatacttacaattacagagtgcaattcctcatttcattttcatgtccactgctattgtaacctgccaaagtgtaaacaaaacattcattcgggtagggtagggttaaaattgtaaacgaaacactaatctaactaacgagagcttaaaaaaattgctgcgaacaataataaatagaagagggtataaaaacttacaagacaattttgaacccttgaatgctataagtaacgaaaagaaataatggaggtaaaaattaatatttcaaaggaaattcggaaataaccttttcgacggtcaacatttagattgaggagaaggtttttgacattcactatcgatgccatttcaactggtaagcgctaaaaacaagggtttacgcaaaattctttttgtacctgtgataaatattgtatttctattgtaatagccaattttttcatcctatgtatcatggaaatgtccggcgtaataaacttacaaccgcgctgttcctaattttgtttcattgctacaaaaattaatcaaagaaaaaaaataaacatccccaagcttcgtaaatttagatttatcgtttcatttgcttgtaccaacaagcattctggcatttgcattattcattatgaaattaatagtgtatgcagtgcgaataactaagataaaaaaaattaagaagaaaaaaaattaaattaaatgatcaatttgtaagtttttctgttttttgccatgtacaatcgcatatattgtttgtgcaccttttttaagttcctcaactctcatattattgcgtagtacaatattcatcgttaaaagaaattctcatgatgcgttacccttcctagactatttcttttgtagcagcagcataaatttactcgctaccaactactttgtataaaaagcttctttcttccagtcgttctttcttttcagaagttcatagaagtaaatggctggaaataaaagaaagaggagcaatgcctccgaaggctcggattcccaagggaatgagagaatttcttctttgagtgctaacgaggcaactcaagatttccctcgaggtggggcgtcttcattgactcctttagagtataaagaagctgttttagaggctaagaaggactttatggagtccgcttctggtaccgctgaattgagtaaaaaaactcgtcctaagaaaaagggtagtaaaaaatcttccaaatccgaattggacaacgaagaaaatttgaaggttcatattcaaagcttaagatataaaaatatcacacccggctctttaattttaggtcaaattgctcaaataaatacgttggacttggccgtctcattaccaaactgtttgacaggttatgtacctatcacaaatatctccgataagctttctgatcgtctggatagtattgacaatcatgcagaagataatgcagcaactgaagaggaagacggtcttaatcaaataccggatttgatggatttgtacaaagttggtcaatgggtgcgtgtttctgttacagcccttggctcggaaaatactacaaaaaccggaaaaagacacatcgagctaagtcttaagccgcaagatgcgaacggttctgctcctgaggctgcggattttgttgctgggtcgatgatacaggccgtggtttcaagtattgaagatcatggtattgtttttgatattggtattaataattatactggttttttatccaaaaaacacataaatgatttcccttttgttgaaggccaaagtttattgtgttccgttatttcaaaagaagatcgaattttccatctttctctcactgcgacatccactaaggcgcttgaggttatgccttctgtacaagctattcttcctggtgactatataaatgttttggtaacggacatcaaggaaagcggagttattgcaaaatatatgggtgtagtagatgtcactagtgatatttatcattcttctcccgtgaaaggggaagatttagaagataaattccagcttgctaaatctgttcctgctcgcgttctttttgtgattcccggtgatccccctaaaattgcagtatctttcttacctcacgtgcttaccttcaacttcgcaactcccaatactccacatcccgatcaactagatattggttttatcgtcaatgctgctaaggttacgtatgtatcctcctcacttggcgttttttgcgatgttggtgtacctgagatatccggatttgctcacatttcacgcctttccgataaaaaggttgctggaattagtcccaattctggcccctataaagttgatagcacccacgaggctcgaatcattaattacagttatgttgataatttatatatcttgtcatttcaacaatctgtattaaaccagcagtttttgcgaatagaggatatcgaagtcggtcaatttgtcgatggtaccattgcgaagcttatacctcaaggaatcgtggtaactatttcggaaggtataaatggtttagttccctctacccatatggctgacatagccctacagtttcctgaacgtcgttttaaagttggctcttccgtaaaatgccgtgttttaagtacgaatgttctacgaaagcgtgtcctcttaactctcaaaaaatcattacttaacacagatttgccattgatatatgactatgaacaagctaccccaggaacacaaacagttggaactcttgctcgtatttttgaagatggagctatagttgagttttacaacagtgtccgtgcttttcttcccgtttcggaaatgagcgaagcttacattcgtgatgctagagaacactttaaagttgggcaaacactttctgttactatcgtcagttgtgatccagagaatcgtaaaatgcgtgtcggctgtcgtgagcagagttgggatgctaaaagacttgaaagatttgaaaacataaaagcgggttccgtactttcaggtattgttcttcagaaaaccgaagattccgtgatcgttgatttaggagacaaggttactggtgtgattacccttggccaactttgcgatggagatttaaataaatgctctaaagtcatgaataaattaagagcttctaccaagcttgctgaggtcttagttcttcgtaaagacaccagtaaaaagttgatttccttgtcattgaagaaaagccttgttgaagctgccaaggaaaatcggatgcccatcaatatcactgatcttaaagaaggtattaaatattttggattcgtgcgtaatgcgactacatttggcgtttttgtcgagttttgtgacggtttagtagcattagttccaaaggcctatatatctgaagagtatgtgccagtcccttcagcagtctataaaccccagcaatccgttacctgtgtgtgtttgtccgtagagctttcacaagaaaaggcgtttatgtcatttaagcctcttgcgcagaaacaggagaaagctgtggaatttatggaaagcaagtacgatatcgacaatccagtcgatgaaactattaaaaagacgtatgactacgttgcaggaaaaattacctgggctgttgttacatctgctaaagcttctcagcttaatgttgatttagctgctaatgtgcatggccgtgttgatgtttctgaggtttttgataattttggagagattgttgatcccaataaaccacttaaaagatttcataaaggtgataaaattcgagttcgcgtcttaggtattcacgactcaagaaatcataaatttttaccgatatcgcatagagtgtctccgaagcagtttttagagttgagcgtacgcccttcaatattgaacatggagccattcagtatgaaagaacctcagttcaaaaagggtgatgaggtgactggttttgtcaacaacgtctctaaggagtgcgtttgggtttctcttactccttctgtcaatggtcgtatacctatcttggatctaacgacagacgttaaagaattgaattctttacaaaagcattttttccttggaaaggcaatcaagtgttatgttgttaatgccgaagactctattactctatcagcaattggaccattacagggatttgaaaacttgacccccggaagtagacttgttggcaaagtgacaaatgtcaacgaagctggtgctattttgcaacttcctggtcatatgtctggtagagtttctcgaattgatatgtttgacgattacgatattttacccgaaactaaatttacccgcaataatttggtaggtgtctgtgtcttaagtgtggatgtacctaatagaaaagtggccttatctgctcgtaattctcgtactcaatcgcagcctgtggaaatcaaggacaaggaaataaattccgtagatgatctcaagattggtgatatatgtcggggatttgtttgcaatgttgctaaccaaggcctctttgttacgataggacataatctgattgctcgagtaaaaataggcgaattgttcgatacattcattaaggattggaagccccattttcacgtcaaccaactagttaagggaagcatcgttggaatcgacaatgattccaagcgtattgaaatgtcattgaaacaaagcaaaatcaaggattcctcggaaatcacgaagacatttgctgatatagccgtcggtagtaatcttgatggaactgtcgtcaaagttggtgactacggtgttcttattcgtattgatggaaccgacaatattgttggattatgccataagtccgaaattgccgatgcagttgtactgaatatcagtaaattgtatagttctggtgacaaagtccgtgcacatgtcttagacgttgattctgaaaaacgccgaattgctttagggcttaagtcttcctattttgattcggattccgacatttcaatgtctgacaatgaggaggacgttgaaatgagatcagaggatcaatcagatacatccgaatctgaagtcggctcgaaggatgatgtccaatctgaagaggtagaaaatctggaatctgctggtgatgaggatgaagaggaggagccaagtgctcttcaagccaacggatttgactggaccgatggaagtactgtttttgataagttggctgatgatactgaagatagtgaggatgaagaagatgaggaaccaaagcgtaagaagagtaaatctgatcgttttgacgatgaagaaaaggatttggatgaaattccaagcacagcagctgattttgaacgacagcttctctcttcacctaattcctcactgttatggattagttacatggcgtatcatttaaatcttaatgagttgcaagaagccagagaagttggaaagcgtgctctttccacgattaactatcgggaggaagatgaaaaactcaacgtttggatggccttgcttaacttggaggttgcatatggtactgaagattctttgaaggaagtttttaaggaagcatgcgcttattgcgatgccttaattgtttatgaaaagctttgtggaattttaattaaaggtggtaaagttgatttagccgatgagtatatgcaattaatgttgaagaactttaaacaagttccatctgtctggattcaatatgccacttttctgttgaacaatgataaagcagaaaaagcccatggtcttttggaacgcagtctccaaagccttcccaaaagtgaacacgttggcatcattgagaaatttgccattcttgaatttaaaaatggtgatccagaacgtggacgaacaatttttgaaggtcttttaagtagttatcctaaacgtttagacctttggaatgtgcttattgatatggagatgaagcaagatgacccatctattgtgcgtagactattccaaagattactagcgttaaacctttctacaaagaaagctaaatttgcgttcaagaaatggctagcttacgagaaaaacatcggtgatgatgaaggtgcagagcaagttaagcgtcgtgcaatcgaatacgtttctgagagccattctgaaaattgattgacgggtttgttgttgctggttatactcatgtgtttattgctgaaaagggcaatgtactaaaaattgaatgggaaaatggtggattatggtataaatttccaacatatgcctttgaactttgttggaagtttttgtttaataatttttgtttgtagattttggttatacattagacagctttttcgaaacgctagaaaactaatcaatgcaaaaggtcttataatcgggtttatacatgctatagaggggtttccttgatttgaaaactgtaggtatgaataaagtgagcttaaagagacggctaatcgaccaaaaacataacatggagaaagaaatagtaaatatatatacatttacactgtacgaaagctaactagcaatctacatctttaatgaatataggctacaagtagatgagtactaacaagaaaatgaatactcaagggtgggatttatttattagacacgtaacaaatactacgcatttttagtaaagtctgtgaggcttacccatggtagatttgacgaccaaggagccaatgttttgccagcccttcttcaacaaagaaaccaagaagttgacggcaagcatgatgttagcaatcaattgctcctcagacatctcgacatggccgacagcaacaccaaggcaaaggaccttcttcaattggaacttgatagtggacttaacctcggtgattttaccgtaaaggtcgtcagcatgggagacaggggaagggaacttaccagccttggaaagaccgggacccaacagacgaggaatttgcttgatgaggacttcagaagcaatgaaagcatcatacttcttggccaacttcttgacaagcttcttgttcttgttaagctttttcaagtcatcgacggacatagcatcgacaccaccgtgcttggcacgatccaaatcatgggcatcaccgagaatgcaaatggccatgttgggacgaggaacattgggcaacttgatagtaccggagaaacgcttatcacgttgagggtcatagttcttcaaaccaatttgaagctcgacagtctcagtgaagttacgcttcttctcttcagagcccttgagaatttgctcgacgttagagcggaccgaggcaacgctgaccttagacatggtgcaatgctggtgttgtgcggatgcgtgaggatttcagctactgaaatttcatcgtttgtgttgcagtagaatgacagtcacatttaagaaataattagcattagggtagggtctagtatatgaacatgcatacttactacttccaaggaaatttagaataaggaggtgcaaactaagtatcattagactattgttacgtatacgggtgatgcacatcgttatacggtaaagatgttgaaggaaatcaatcttagtgttggaattaaagtacaaggattaatttggagaatatttatgacctggaatatttgaaaatacatatcatattaattagtgactagtccaaaggcattgaaaaatttatacaagtgaattaccccacagtataagatcaagtttatcgtaactatagatatgcatcaactttattgaaagcaatgaggacagtaataagtatcctgtatccaagaaagatcataatcaagcgagcatatttatataaatcttcaatgaaacattgaagcatcaagctgggcccatcgacctgtaaaaaaacagagaggcaatttattataaataaagattacaaacacataggaggaaaacatatgaaaaaagatgcttccataacgaaaccatcttgattggcggaaatgctcaataaatacgcttattgcaaaatagtaagaaagaaagtagcgcatcgaaatatttcaaacatttttgctcttaaggtgattgatgtttgttgtctttttaaagttagtaaaaaaattaagaatgagaacaagttaaggcataccgtttgaggctaaagacgagtaggaaggaggagcaggacctgaatgaggagatacggcatgttctggattaggagtataacgaacgaggggatcgttgggagagttctcaatatccaaacgaaccgttcttgggtacttaataactatgtaaattgcatggatgattccaggaatgcctaaagcgcacaagcaaatgttgattagaaaactaaaataaagtcagcgacgttgaaaaggaaaagacagcaaaaaagcctggaggaaaacatactctgcggtgcaaaagccccttcgaatgcctaccacgatgaaaggaacaaagaaggagagaacaattaataaaaagtcactaagtgtaacattcgacattttgagtgatgcacacagagtttaaaaaaggtaaaaaagtgttaaagtaagaaaagaagcaaataatgattcagttggtggatttttttaaaaccgacgagatatatttgaaaacccaaaaaatcagaaaacagaacgatccaagaacaacgaaatccgtttacttaagatccaaaaaggctttaaagtaggttcagttagtaaacgttgttaattgcttttataggtatgttgctggtaaaagacaagtatggtgaatgacgaaattcagcctcactgagtgccaagccaacacagatgtaaacaaaaggcgtaaagaacgaagaaaacatagtgcacaagacaattgagataatagaatccgatatttgatttgaagtgcctatcaatattcgggacattccattagatcagagagccccaatgaaagagttaatggcgttaaaaattttaaccatgaaaaaaccttggcttttgtttaaattgtttcatccaatatctcggttaacaaaatctagttatttccttgtctaaatatgggtactaaaatttttacaatctacctatattatctcgcttacatgattattgaacccaatgtcctctcatactcgttctttaacaataggtacttgatcaacctcgtttacattatactttactaaggaaataagacaggatcaaaaaatcctttatgaatactaactcttcagaattatagtattaatagctactttttgatactatcactaactaaaataataacgcttttccaattcgtcaatatgaatgcagcaaaacatgcaggtacttaaccaaagtcgattgactttcttaacgttaaaaaaaagaacacttcataaatattccattactttcatactatgcatttgcaatacgtattagtcactgcgatgtgcttacatatcaattgaaaaggtaccacaacatttcgctttatcatggcagcaatttattgatactatatgaacagcaaacaataaaggaaactaaaaattatcgtgttctctccattttgttctgcttacacccatctcacctttgtttattaaatagtgatttattagtgcgatgtctaaaatgagcgttttactaacgccaacatcttaaaatacggtattagaaagagcgtatcgttatttaactacattgctatcagcaatactgcactataatattacactacgctacatatcactatatgtcacatgttctaatgtcctgtttgcttcatttactttatatgataagttatcaaacaaattataatatcatccatggtaatatgactaccaagcctttttcaatattgtaaattctgatcaactaaactgaggaacgaagttcagttataagttagattaagtgataggtagcaatgaaacctacatactagaatacatttaccaagttgctacttgcattacctgtgtaatgcaatatatgatcataaggaaaactaaccacaagttctacgtatcgttaaacaaataccaaactgcgtaattgacatgatttgcgaagtgacttgtagtgtcatattttattacacagtaacaaaatacttcgagatctctattaatgcataaggaaagctaagttagggtgaataaaaagggcagtgacaaaataaatgtgtcagaagcaattacactaaaatgagttttggaaatctacttttcacttgctattattgaagaaacagtttgctttgaaacgagtattgttcatttatttatattgaacggcgggaactgaactccagagtgaatattcttgattttgctgtttcgtttgtcgcaatcatagcaattaattcgcgcatgtgttttattaaataaagaatgatcttgatgaaatgaagaataattgcacttccttgaaaagttctatagatgaggaagatgaattgaagacagatcatgaaatcgatttggaaaaagggctactcccagaatatgattcaaaggaagaaggcgcattacctctatattcaggtaagaattgtaaataataagaaaggaattattcaattgaaagttgtaacttgccattgctgtaaaataacttggatgtgatcattgtttacagttggccatgcaatgcacacactttgatacatgctttttcttaactaaagtctttcaatcatattaatttaaacagatcatgcacgtttaagcaattctcctaacacacatagagaaaacaatccttccaggtcgacagataattcttcccctttgttgataaaactgctaatatcattcacttcaatcattctattcaatgctccagcagtttgttatctaaagtataaggacgctttttttaaaaattatggtgcagcggaatggacattatttggattttggtgtcttgtttgcactttggctttaatattcttgacttgtaagtgagacaatggggttattcttaccttcagtcactaactcattagacttctatgaaacttggaccaaggcagttaaagtaactgtaattttcttggcacaatgtgtcaaggcttgcggaaaaggaatcaagcactttttgaaaaagtgggaaaacatgcctatggctttcagtgaagtctttttatttaacatatttggtggagcattgcgaataatttcaagacacttttttggcaagagatggggattgaaatgttctttggctgatcacattatctttgctatattgagcatccttgtttttattgctgaaacaggtttgttgttgattaaacacttatttatattaacaatacagtaaaacctggatcaatcagggtcaacttgatcagaaagatgggtaaatttaaaatgatatctttttaattgtgtatgctaattatcattaggtcatgaggccaaacagcaagtgaatgaatacacagctattccattgcatgagatgaaccctgaaagtgaagcctaattatattgctaactttactattgattctacaagaatgtgcaatggaaagaagcatctatataattgtgatttaccaaacaaatcatgatgtgtttagactatatcagatgtatttttattgcatgatttcatttcctgacaaattattgattgtgaaagcgcgccctgtctctaagaaatatgtttgctgctttgcttgtcaactttgtacggtatagtgcattttcctatcactacaaagggtttaaatacaatttataattataaacttttgcagtgttgaaaacagcagttcttagactgatcaccaaaaacatctattggaattagaaaccttggatagtaattttaaacgaatcgattcgtgcctttttttggtttatttttaatttatacaacttttttcaatgtttattatatagtgcacggcgtaataatacgtattgtgattaaaaccaatacatccttatccgacagtgaaataagacgtcgcgtctactcaatgcgaacctgcgcataacgacaggcactatgatcttttgcattaattcctctacttgtaggatgaggacattttcaactattttaggaagaaaatgaaattgatatcatcgatcattttcgcgcatctaaaaggaatgaaagccaaaaacttgctggcacggaattacggttataatgatgttcaatttgaccagatcaggtttttgcaggaattaaattttccttactttcaaaatagtgatttttgtaaatcattttattcctcttcacttctctcattctgttcttctatccagctcagtcatcttaagacattgtttaccaaatagtgaagtttactgtgtagtaagcaaggattcgaaaatcactctcattatcgctatagtaatgagttcgaaagtttatcaacctctgtgtacggcctggattacaggcgaaattgggtagagaaaaatttcaataaacaatgttgcagttttgcaatccgctttgattaaaaaattcaaatttcagtttccaagtagattagataattcgacaattttcttgttcttactcgaaatgttaactacaaacattgcaagctgcctatggtccagtccatacttccatcgtccattccctttcacactttatacttgtctgcactagtctcaactctatgctgcgttcctcttttccctagcattgcatcaagctcggattatttttacaacctttctaagtctacgtctacgtctacatctgtatccatatctcaatttacgtcgtccttcgccgcccgtcatattactctgctccatcatctcgtcccttcccttccctttccgctttaaccctaaccaggaaaattgtgaaaccgatggatcgctcgtcgctgtgtactttgatgtgatttcataaaccaccaaacccttccaccggatctgttaaaaccggtcaaaacacagtagaaatgctgttgacttgctataagaaaaagtgaaaaggcaaaccactggagaaacgaatcctcaagaaaactaggtataagcataatttaatggaataagcatatttcttgggtaccacttgtccatcattttcatctatttattgttacttttggatccgggtcgttggacatggcaagatcgccgtaaccagattaggaatagagttattcgctactcatagctcggcgataaagcaaaagagaagagaaaatgctggagctaacacacaggatgcaaataacaagagcagatatcgttgcgaggcaagtcatgggaagtcatcttggatgatgtgcaagtctccgataatagacccacttcattagaaaagctcattttttgacccttctagatgagatagctttagcattcatattacttatttttttggtttcatctttttttttgttttatcttatcctctttaccatccttccctccctccctccttctctttcctttttctacacactcggctgcgttactgtaccctatgtgtctccgacgatcctacgcaattgctactttaatgagctcgcttgtgattcgcttttcctgaattgcaaatttttcctgcttctccctttcccatctttgcgtgcaatgacatcataatgctgtccaatatataagaaagctacatctattttgagccacctgcagataaccaacgtgttgaatttttatacattcaaccaccaattcttgtcctatttcaccagtagaaagatatatcgaaattctcccccctagttttgagattttctttttctcttaaacctctactggtgaagaaaaaaattgtactttcttcacattcttagctctgtgttcttggcgctttatttgtgatattcagtacggtttatttgtttatatctcgcatttcattccaactttaaacatctaaaacgttcgactctcattcctttttatttttttgtcttttcccggtcgttgttgatttttttcggttttgttgagtgaattggaatcgcggcttcaataaaagataatcatcacttttcagcttgttttcagtactctttgtgaaatttctttgtagtacttttcaacgctttttttttccttttatatttttttctatatctaaactcaactctaaagaccggtttgcggcgttttgcttcttgtgctaacaattttacatttaaacaacttgatctttttcaaacattctctttctacaatctttactcatcttgtcttatacacactgttggttgcatactgaatggttgataggttgtttcattagttctgtttcatctgttgccattgttaatcttatactaaatttgtccaagcaataaaaaataaaagtattttttacagttctttgttgttggggtctttttgcggttttactttcaaaaattttttccttagagttaaattgtttatctcacgattgattatttgacctcatttgtcaaccacatccccattccaagctatctattttaaacatttagaatctcttttttttttaggtacccaagttatcgacttttttgtttttcctctcatttttagttccttccttgtacttgtgtttaatcattactcatccttggatttctgcattttattgacgtttggtcaagttttctatttattccctcttgtgtattttttcttttcctctggacgatagtttcttctcattcctttcatcatattccctattcctggtaactcaaatcaattcatccttgtctgtttttcttttccctttttcatttaaaccttttcagacagtttcttattttttaaattcttcatacttacggttttcgctcgctcctttaatcatgtcttctcctacttctcctacttctagtcctggtcgccatcattggtcaaactcgaaagacggtatgccgccagagtatactaatcaggatcccaattctgatcaagctgataacgaaaactctgatgccaaggctcaccaacctcagcattctccccagcattctacagaaaatcaaggtcatactgggactagtgatacttcgtccctggaaatggaactatcaaagttgcacccagaatccaaacaaaggcagttgccgcactctcctgaacatgagcgatctcgatcgcctattgcttctgtcgtctcatatcgctcgcacatgactttggaagatgaaaatcagatttttaatgccgaaatggctgtccgtggttctcagtctttgcaaagacgtcctaccggccgaagtgttcgcggatctatgcgacgcctttcttcccatcgttctaaatccatgcgtacctccaagtctaaaaagtcgggcgattatgaacgtactgcggagaatgaagaagccgctcaagaggctgagaatcatttagacaactttggtgtagtgacgtttggtactgaagctcctattaaggctccggaccatcctgtaactatttttggtcgcatattcaaatttattcaacagcgaagcttttaccttcgttcgctcatttacattattcctctcggggttttactcttgattccagtattcattggtcgcttttatcacccacaacctccttaccgtgatgaactaggtcatgaatatgagcgccatttacacgttggaggtgttgatttgatgtggatggccatctggtgggaaattatatggctctctatatgggctgctcgctatgctgccaaagtaattccttatttctttgccttcttcgtctccttcatcagtaacaacgttactaaatggagatgcatggcagttgcccttgagtttcctattacattgttcctttggatgttagctgtatatgtcagtttccttcccattatgacccgccgtcatattggtgattatggtgtacctgatcatgtacgcgtaaaactcccttggcaacagagcgccaacaatgtacttatcactttattcatcacctcaattatgaatttggtggagaaagtacttatgcagttgatcgccatgtcgcttcaccgtcgtgaatatgaatctagaatcctttacaataagtttgctattaatgaactcgcccgtttgtatggatatgcgcgacagcgttcttttgatttcaaagatgctatccatcgtgctcaagcagatgtttttaagtttgctgatcaccaacatggcaagaagcgcgcagcagctgctcgggttgctcagaatgcattgaataaaaccacttacaaagctatctctgcattcaacttcgctacggatatggttaacaaagtggctggtgagattactaatcgtgaggtcgaaaaatcttcttctcctaaaagtgttgtgctacacttgttaaagaccacacgcggttgtcaatctctagctcgttgcttatttgaggcattggtgaatcctgagaatcccgatttagtactggatgattttattcccgtatacaccgatgaaactggtgaagtggataatgccaccttagaggcatgttattctatttttgatcgtgatctaaatggtgatatcacctgtgaagaaattgaactcgcatgtgtggaaattggaaaagagcgtaagagcatttctgcttcacttcgtgacttgaacgattccatttctaagcttgatggtatttgcatgtttatagtggctgtcattactctttttattttcttatacttgattgcccgtaactttagcggtgtacttacctctgctggaactactttgctaggtttgtcttggctgttctccggctccgcacaggaattacttagttctattatattcgtatttgtgaaacatccttacgatgtgggcgatcgtgtcgatgtcatgatcaatggcacagtcacttcagcgatggtcaaggaaatttccatcatgtctaccgagtttcgtctattgactggaaaagtcattcaagctccaaacagtttgctgaacaccctttggattttgaacatgcgtcgtagtgatggcattgctgacccagtcaccgttaacctgaagtttggaactactcttcagcaaattgaacaactgcgaatcaaaattattgattttttgaaagaagagaagcgtgattataaacctgacttactaactgaagttacggatttaccggatctctattccatgtctttgtgtgttgtattctttcataaatataactttcaagacgaggttttacgtatgcgtcgaagaaatatgtttatgtgtgcattgatgacttatatgcaggaattggatattgtatctcctattttcaacagccctggtaaatcaaaggattcacctatgtatgtcaacttcaacaatggttcaatggagggtgttaagttatctggtggtaatgatggtggtggtactgaaaatcatcgcgacagcactgttggcggaggaattctgaagaacccaaaagcatatccttaccgcgaacctactcctcctggtagttcagattccgataccgctagtgtttctaaaaagcgtgttgacttttcccttggaacacggcatctgatgcctgcttttgatgatgttgctgatattggaagtaaaaggcttggtcgtgatagtcttcccgatgctgtcattgaaaacgctggcacagaggccatgcgacgcgaagctgaggaacgtcgccgagccgaagaggaagagtacgaacgttctcaacaagaatctagttcgaatgaagaaaacgaaaatgcatcgcgtacgtcaggtgctcgttttagcttttcctctaaagctagtcgtttgtcggctagacccagtgctcgtacagttcctccgttgcagcatatatcaattcaagacttacgtgagccaaacgaaaataatacttctaagtctgctcgactttaaatacccataacactttgcaaacttgcatcgctcatgctagttttacttacttcattcgttgaaagtggctatttaccattttgggcactatttgtttcttttttttagtttttatttattattctatgaaatgtttaaacgtatattgtatctcaacagcaaatttttgtattaatattagctatgccttgtaaagtttcgtaaaagttatgcaaatgatttacgaataatcttaaactaaaactagtataatgcttttttcacgtaaacaatgactcaccgtcgtaaatttagacgtttcaagtgcgaatgaacgttaataattgttcaaaggtttcgtttttataataattatttcgttttcataatcgtaatttttcacgaaaaagtgtttgtgttttagaatgccaacgaaattctcgtagcgaaacttcgagtttgttttaaacattcaggaaacaaataatgattaaaaaacaaaaaaaaaaaaaacggaaggtaaatttctataactaagcaaagataactgcaacgatgcgtactgttattagcaattatttttcgtaggtgaagaaggtaaattggaaatttgaatgcgagtttcaacggccaaatcatcagcttggttttgtgcctccatgtccggacacattgaaaacttgtcatcagcaggactgcatgcccctaagggtatcgattgaggcgatttaaagttttcaataccaaccaagtctagcatccaagaaaaagcagcgccaaaaaagccgaattcgaaaagatctaatatactgtaaaatatggcttctccaattggcgagataacattgaggccctcagataaaatccaacatgcataatagaggaaccaaatgacatgtaagtaaacaattgaccataaaaaccctaggcgcgcagacgtctctaaacggctagcatactttttatgcaaaacgactgagtgtgccaatgcaataaaatagcctacaaacgaaaatccgtaataggcccatttatagggagatgaagttaatgctgccgccagtaagcaaacaatcgcaaaaagcacatagcaaacgacatatgcaatttctagtatagatacgcctaccgtccaatgtagcattacgatgattaatgggaaattgattaaccattgaatatagcgaacatagtaaaccattcgtacactaacttctcgaaaaaaagaagcagaagaaaacacatttttcaatccataattgcaggccatggtaaagtaggccaagcaagaaaccaaactgaggatggaaaagaaacggtggtaagtctgcttttgaggcaaactgaatatcgatactaaaggaaagacaattgcgcacagcaggaacactgcaaaaacagcccaatagtagtttgagcttatcttttgcaaagcgacttccggaagctctttcagtaccattccggaggaagataatttcgcattcatgatgcgtaaacaggatagaggctggattaaaagatatagaaacaactcttatattcttaaaggtagcgatactagttgagttgaaaagtcaaaactttgtaataatgggtagctgagacacggtgaaggtggctctgagaaaagtcgattaaaaagccatgtttgtaaacaaacaaacttcaacatgtaaacaaacaatgatgttactctttcccattaaaaggcattttaattgactctaattgagaaaacgcaaaagaacattacagccagcaatgtcaaatttttcactttttcttacttaccgatgacagcaaaacaggtaaagtcgcacgttacagaagaagtccgaagttgagaaacaaaaaggtataataaaaaaataaaattccaacctgtagaaaatagtttatgtacaaaaattaagaatttcgacattgttggaagtaaaggtggatacatcatataaacattacaatccttctctttttcttaaatacaaataagctcatcaaaatatatacatatggatagcagagtggaaaatctttgtaacgaatgtgtatgtcaaaacgattagaacgaagagttttttaaaaatggaaaacatatgagtataggtaactattaaagaattcgcctaggaaatacttacatcacgccccaaaaagctattaaaaaaataaaaccgagttttcacagatgttttaaaacacacctaaaaggtaggattgaaattagaagcgtttagggctccaatatcggatgcttgtactcggataagttgtttaaagtgaagcaaaagtctgggtataatttatatacacaaataggaattcaaaagttctaattcatcaaaaaagcattaagcatacaaataaagcatggcatgaggagaaaacttcaagaaacatgagtcatattgtaaaataagaagttaaaatatgttaaatggttactttaattcttggcagcaacaccaaagcgctcagcacgcttcctagctttttctgcctctatagggtcgtccaaaatattactcttccgcttggatggagcacttttaggaggcgcattcttatttctttgtttagaacgtgagttggaacgattttgagggttcttagattgattatggtttttgttattacttgacgctaaaggttgttgaatgccaaaacgtgcagcacgagcagctttcttaatttgttcatcgtccacaggaatgccaaatcgtttagccctttggatgagtttttcttgctctttagctacatctgggctagagacttcattagatacactttgtttggattcctctgtggtttcttgatgctcttcagcaccagtggaagtttcaggagcttgtgaagtctctttcgaaataatgctttcattttccttttcaatctctacagcagcggcaggagcactggtctctttactttcgggttctgctggcttgttaacgtcagttgaaatagtatcattctccatgtctccccaatcaatatcatcctcgggaggagcaagatctcctagatctgtagcgttgttattcgaagtattttcatcgttactctcggtcgctgctgtcaatcggcttaccaattcagctttgtttccagcagtggagaggcctttctccgcaagtttttcacgcagttctgcaactttaagactcttgtaatctgacattatgaatatagacgtatatgcgcgtcaaaataacacgtttattgaattcgggatatacgcagttgacaagggtgaatatgtacgaaccagccaactttagtgagacatgttggatgcgcaaatgaagcgtagtgaattggagtgatgattgtgtcaaacatagtggtgctattttgcgtatcgctatgtaatgtttactgtgctatggtgaggagatggttcaaagaaaatgtctataaacgatgttgggatatactttctcccttttatatgaaatgtacgaatcaaaatcagtaatcagttagattatttaatatttattttttactttaattaatcgtaattttgaattggcattttaaaccgatttctagaatactaaaagagcttgaagaaagagcaaatcattcattcgttccttacaaagttattattatagtttacttgtagatagtgaaaaaactccatttattgaactgggtatttgctgctacgtttgctttaccttactatatgcttacaacgattatgaacttaacaggcaattattagtttagtatcttagctcaagagcagttgatagtattcaaaaataaaaacaaaatcacatgtaattacagtcatagtttaatgtgttaaaacggaccattcatcaagtatgaacatttctttctaccattccaggaaatattttcatgaatacaatttataaaaacccgacatcaacaacaaataatatcattaaagcacaattaaactacaagcgccttaacgtttacaacttttaaattaaaagtatccagtgcaaaattttggatgttttcccggatgtcagatatgcaagagaaacctatattaaacactgtattttttgaaccctataaaaagatagcaaaaacatcaagatctaaacattgctgttttatacaaaacccgtatactaccaagcaagcacataatccgtttacattaacttatgtatgcgattattcttgggggatctcaatttcgccattgtcgatctccttttgaacgtcgtgagggttcttgccgtcaacggtgcaaccaacagagaaggcagtaccgagaatctccttaacggtaccagaaagctccttagcaagagacttgaagcgcatagtacgggcgacctcaatgatttcgtcaagagagacattgccagagtgagcgacgttcttgtccttctttctgtcacgagcaggctccttcaaagccttaatgaccaaagcagaggcagagggaacaaccgagacagcggcttgacggttttgaatagtcaacttgacggtcacacggagacccttccaatctttggtagccttggcaatatcttcaccaaccttcttgggggacaaacccaagggaccaatcttgggagcaagggtggagccaccggcgacttcaccaccgacggctctcataaagatggtctttacttcattgggatcgaactaaaaggattgttagcaaatgagtattcataagaatgtgaatgaagtaaattgaataaaaaaaaataaacgaattcactaggaaaactacttactttgggaggcatcttactcttgcttggttcaagaaaaatacgcaaagtgttagttttgtttttgttttatgtgactgtccgaaatgagtgtgactgttcctgagggcacccacaacaaaacttctttaatgaagcgatcactggaatctgtacaagtatccgaattttgttaggtgacattatcagtcaggaaaaaataaataaatgcatcgctgtatacgcatcaatgtatgtatataaatatgttattaagcaaaagaaactatcataaatgattatatagtatatttttatttgagaagtaaaaaatctcggttggcagtggtctggatgagtattgaaggcattaccacttttggaagcttgatccgcccatccttaggctgcttaaaacgaaatctgcctgtcgtggaaagaaaaaggtgcattgggatgtaaaaattgtatggcctgtaccgttatttgcataaaaccgctactgtatcgcaaattccccatttactatttgcgaaccaagcatcagggggatgcttggctcgttttcttgtaaaaagacaactaattacatttaacgtattctgtcatgccataacatagtaaatatgcatcaaatgtactgttattatacaaaaacttgtcactgtatttttttttaacattatgcttgcaaacattcggcaaaaggaaaatgaaagcaccagtgaaacgttgcaaccattgctttattatacaggtaaaataagatataaaggatcttatcacattgggaaaaattgaattgtttccaagagggctaagctttttgatccttccaacgactgagaaataatgaaagaaaacgaaattacgccaagcataatcgtgagcgtagacactgataattaagaattgtaaattaaaaatacagcaaaccaatgttagtaaacctttgaatcatagtatttgaacctttaggtataatactgagggaatcgatgaagagataggagagatttttttttaaaaacagagataacatcgtaaatattgtctcaattgatgccagaatttcttctttatgtcatttttaaataaaaaattacaaaggcagctttataatagttctcatttagcggacacggggaatttttgtctggtaaaaagggaaaagcaaatttgttacaaaagaaataaccagactttcaaaaatacagcgctttttaactaattatttttggatttcttcaaactgttcgtcgcagatttcgattcttttatagaagactggcttacacgttgccgcttttctgcaggtttcaatatctaaaacatagtattaataaaagaatgccaatcgttaaatggaatactcacctgaaagctacaaagcaaatcctcattaacactcatcatggctcccacattatcaaattcaccacaatagttgggagcgctgaaaatagtaaccagttgacgtttgccaaaaaactcgtaaccatcttcgacgacttggtgagctcgacaaattaaatccaagtcgtgcttttgcaaaaaccggctcaccacatcggcaccgaatgtataagatacaccgcgatcgttctcaccccatcccgtcaagtccttttcagggtcggaccaaactaaatcacaaagcagtcctgtgtcgggaatgtcggttggacgaatgatacgctgaatctgatccagagaattcaagtctggtgaaagaccaccatgcatacaaaatattttttcatcaataaccgcagcaactggcatacagttgaagcaatcggtaaaggttttccacaactttatgctataccgacgcttacactcatcgtagaaaccataaattcgattgatgctggcaaactcatgattgccacgaagtaagaagaaattttcgggatatttgattttataagcaaataaaagacaaatgacttccaaactctgtttgccgcgatcaacataatcaccaagaaaaaggtagttcgcatcaggaggatatcctccatactcaaacaatcgaagtaaatccgaatattgtccatgaatatcaccgcaaatctgttatttattagtagtctggtaaaacacctttcatatagatcttgactcaagagacaaatcgacgtttagtaaaataaaactatatacgttaaataatcactacaccaataatcgaaaaagaaaattatacatgtatcgagcttcagattattatgcataaaaaccacctctagctttagactttgtgtttgttgtgaaaattcacgcactctatcacttattcacagtacaatcatttttaatcattctataaaaaagcagcaaatgcatacaatgacatgacataaggactaataatagccctgaactactacgtagaataacaaactcgcgatttggtgctctgacgaaccagtaaaaatcttacctttaagggagcctccaactccaacagcataggctgactcaaaaaaatagaacgagaagtagtacataggtatctaatttctgcatcagataactgaacctgcttactaggtttgccattacgggctaagatacgaggttagtttcaaatgtcaatcattcaatcattatcgtgtgtacaaaccttttacaagtttttcaataatcgcatcaatatcataatccataattttttcctcgaaactcctcaaaaatgagataagatggagaacccacttggattgcggtagttggcttgtgtttggtacatccaaaattatagcagtatctttatcgcagtacctgtaaattagggcgagcacaacgccttccaatgtcgttcatctttttcaaattttgcttttatctcaatttcatagtctttagttatttctattagttcctttcagctagtttacgttcgccaatttctaaagcatggacaaagtatataatgctattttctaaatattattttatcgagtatttataatgttacaaaaatttttaaaagagttaaatgagtataaagagggaaacataaggagattaagtctaaggaacagttttaagataatctacaataaaacaagtgaaggaacagattatcgtcataaatgtttcagcaaagaactgaatgataaaaaatttgttcaattcgttctaaatagagtgccctgaaataatctaatttgtttcagcaccaaatagggacaaggtctggtagcatgagatacaaagctactcaatactcgctctattttcctttttttgtacatttctcaatacattaacacttcaattctttatatctggattttcgagaccggatttaagctcttcttaggtagctcgcagaattcctaaaactcccacaactgtaaaccaatcccctaagtattagctcaaaaggataacagtttaagtgaaaatcttgccgcaactcttcttgctgaacccataactcttattctttttgtcaacgaaaatcatgagtgaaatggctacgccaattatcactttcctacatgattaagcatttatattcgaccgagattctttatttttaaattttttgaagcagtaaataagttgattctccaaggtataattctttcctcaaacgtacgaagatgataaacaatcattaaaccctatgggaagtaagaaacacataattttccctttttaacgctctcgattatttaaaatttatttattttaaaaacaaaatggttcctaaataagtaacaaaaaaattaaaaaagttggctatatcatatctcatactccatgtttgaataaaaaaccaactcatgttgagctgagaacatagtcttaattatctttaaatagatttcacataaatatttagtaatatttttctctaattcaatttaagatttgaataaatgaagttgaattgcttctaggaagcttgatccttagaagttaattaaccacgtctaacaaaacgaattatactattctccgatgatggctgtattcatccaatttttattgcccttctgagtaaaattaaagatttaagcaacaataaaaaggttttttaaatttgtttatatggcattgttattacctcaacattttaggatgcgctgtttatacactctccgttttcgtttgtagtaattaccttttttgaagcaatttagctgaaaatattttctttaagagaaaacagagagggtgtatactgtctgcatcgttaattttgcacccgacttttcccggctgcggatatcctctagtattttgttagtttaaaaactttcttcacgctcaattgtttcgtatgcgtgtcttttaccgaattcttggaattaaaggataatattgtcaattgaatccctcgcatggtaattttacgtacaatcgatagtgcctaatcaattcgaataaaaaagaaactgagaatggtgtgtaaccgaattgtacattttcccgttccctgatttatttatttataaaatgctaagcaaaaaaatgaagatatgccgtccgtcgttagttttaatttacctttggtatcttgtggactgtacaagtttttccatgaattcggtaacttgcttaagactaatgcagcttcttttagcaaaatactatcaaattcccatcgatttggttggagaaaagctttcaattgtttctgcgtcttcctgcttattgcagtacttagttgcattggttgttgttccattctactcaacgataattaagaagttaacgccatggtttactgtttttacaacttgggttggtgaggagtactttttctttgcttctacactctctattctatacatggatgattttccaacgtgtgcatattttgttattttttcaatttcttttctactaggaatcagtggtaccggcccttcattaaacgcaagctataaatccttatgcaaattgtatagctacgaaaactctttcatcgttgtcctaaatagcatctttgttgtctccagttgtattggaccatttctcggtagcatactcctgcttcgtgttagtttattacaattatatttgatatcttggacaattcatttcatcaattttgtatttcattctttattggctgttttcttttcttcaaaatatacctcctacgctcaaaaagaaggacaaccgattttgaatgcaactgaaaatttagaggttgagtataacgctttaaataccactccttcttccttcgaagaacaacctcttttaaatggcttaaatgactctccgagaaatcccgtttcaagaacgaatgctgaaggttttaaagctcttaatgcttcttttgatgggtcatataaattccccatacctattgttcttctttgtttcttcttatatagtcttttaactcccttctttgatattcatctacagtttcaactgatagtcatgcacatgtctatcgtacaagtcggatttatcaattctgtaaaaacttttggatctcttcttacttgttcagtatgtctgtttttaacttatgttggtggtttttctgttcacatgatgaaaacaactatgttaatcggtttgactgccactactttgatcatttttattctttactttgcaacagcacaaacccttccatgtctagctttattctacggcatcacgagttctattggtccttccatacatgggcttgtggccgcatatgtacctaatgacaaaccacaccgttattggaaatttacggctttgttggaggcttctgccaccttcatatcttatccttttcaatcacttgcttttatcgtttgtctcaaatattgctctttttacttttttattgggcctatatgtatctgcttgctaggtagcatctctagttatcttttactgggctaccactagacaatcaaacaatcccaaggtattgaagcagtatttgaatatctaaatcttcaagacggtataagcattgactttatatatattcccaatccattcaatcgattggttcaagcaagcctgttctttaaaaagttcaaatttcttcttttcttctaacgcttgattactgaatgtcaccacttttaacttcagccgtcaccaatacttttttcacaaaactcgcatataataatactatacgtctccaccggatcctatatgcgcttttaaaaatacatcctttcttatctttgttccaaccagcatcatatatttaatttttcatgattgtttcaagtcattacattagaacacacaaccaactatacaacataaaaaaattttatataattaattaaattgaagtttaataaactaaatgtatgcttagtagataagtttccatcaaagatgactgcaacgccgttctcactgtttcttgacatttcgtgaataattttaatttatttttctttattgattaaattcatataattatttatgtttcattgcttttattctttttcctcatagtaatgttttataatatgtatagtgttccaaacactacccacaccccaccacacagtccggttgtggttctttatagaaatcatgaatttcgaagaaatcgaagaacgtgacggtgagtagtcctttaaaaaaataagaacagacactgaccttgtttataggagttcgttttacctggaacgtgtttccatcgacgagaattgaaagttcacgaacgatcgttcctattgcttcgatttacaaacctttaaatgagcgtcctgatttaccacctgttctatatgaacctgttacttgcaaggctccatgcaaagctgttttaaatccctactggtaagaaacaaagttttatacatcaacctatcctcaaactatgtctaacaacattatagccatattgacactcgtgcaaagttctggatttgtaagtcttcattccttttagctagttttcaatgatcaagaggggatttctgacatatattctaggtccattttgtcttcaacgtaatatgttaccacctcaatataaggacatttccaatactagtttgccaattgagttattgccggaatattctacgattgaatatactttgcccagaccaccccaactcactccagtctttcttttcgtggttgatgtctgccaggacgaagaaaacttgcaagctttaaaagattctttaatcattagcttaagcttactcccccctgaatgcctagttggcttagttacctttggcaccatggtagatgtttatgaacttggctacactgaatgttctaaatcttatgttttccgcggatctaaggactacacttccaagcagattcaggaaatgcttggtttgcccactagtaatgtttctccagtcgccttacaacaagctcgctctttccaaggctcggctgctccatcgcgcttcctccttcccattcaacagtgtgaatttcaacttactaacatcctcgaacaactacaacctgattcttggcctgttgccaatgacagacgtcctcaacgttgtactggtaccgctttgaacatttctgtaagcatgatggaaagtgtttgtcccaacagtggtggtcatattatgctttttgctggtggccctagcaccgttggtcctggaactgttgtttctaccgaacttcgtgagccaattcgttcgcatcacgacattgaacgtgaccaggcaaagcacgtaaagaaggcactgcgcttttatgaaggccttaccaaacgtgtcagcgccaatggacatgctgtagacattcttgccggatgtctggatcaaatcggaattatggaaatgaaaagcctggcttctagcactgggggttaccttgttctatctgattctttcactacttctatctttaagcaaagttttcaaagaatatttggtcgtgattctttgaataatatgcttcttggatttaatgcaactatggaggtccttacaactaaggagttgaaaatttccggtcttatcggccacgcagtatccctaaacaagaaatcacaaaatgttggcgatatcgaaattggccttggtaacactaatagttggaaaatgtgtggtatatcaccaaagtccacttatgccatttactttgaagtagctactcaaagtgcctctgcccctcagggggactctcgaggtttggtacaatatctaaccttgtatcaacattcatcaaacacattccgacttcgtgtaacaacagtggctcgcgcttttgctgatggaggtagtccattgatcgtaaattcatttgatcaagaagctgctgctgttgctatggctcgtattgcagctttcaaagcggaagtcgatgatggacctgacgtccttcgatggaccgaccgaatgctgatcaaactttgtcaaaagtttgctgagtatagaaaagatgatccgtcaagtttccgtctctcttcacaatttaccctttaccctcaatttatgtattacttacgacgtagcccctttctgcaagtttttaacaattcaccagatgagactgcattttatcgtcacatgctcaaccatgaagatgttaacaattctcttattatgattcaacctaccttgcaatcattttctttcgaacaccctggtggcgttccagtgctgctggacgctgtatctgtaaaaccggatgttattctcttgctcgatactttcttccatattctaattttccatggggacactatagcccaatggagaaatgctggctatcaaaatcagcctgaataccaaaacctaaaagaacttttagaagctcctagagtcgaagcagcggagttgcttattgatcgattcccgatccctcgatttatcgtttgtgaccagggaggcagtcaggcacggtttcttctttctcgccttaatccttctgaaacgcacaacactacgtctatgtatggtgctccacctgctcatgctattttaactgatgatgtctccttacaaaccttcatgagtcatctgaaaaaacttgccgtagctgtttcataaatgcactttatgaaatctataaactaccagcccttacttgtagtcatcgtttttaagaagtttagtcttttggtgattctcataaataaaaagctttttatgtttgataaacttcttggtctctccagctgactattataaacattaatgaatgattaaaatttcagcacttttggcttgagtctaggatagcatagtcttgcttatcaatattatttcgtttactgatgttatatttctctagtattacgctcgttgtaatttgttggttttttaaaatagataaatattttatgaattttttgtgaagttatgttgagcaaaataaggatatcttcaacacaatcgatttttagagatggttgaatgttgatgaaatggcgaagctcatttttattatgaaaataaaaaaatcaacgttttaatgcaaaccatcagtacgatgtgtggcggttcaccccttgttaatgctaatttccaataaaagtaaaacgaataactacgtaaacaaaaacgaaacctcaatgatttacaatttatctattcaaattattacgacaaggaaaattacactgctttgatatctatgtaaacttaaccaaatacctggtacttgcgaaatgcagaatcatacatcaaatccatctacttgctactaagtatcactctaaaatctacaaacacgacaaaaactaacaatcattttttatcattgttaaactttgatgaaggtaagggtgtcttctcctgtttcactttaaactcggccagcaagcaaatatgatcactagggaagtgtgcgttagggaaaccaacaacgccggaaagataatctttatccactcctttcaacaaaccggttacctccaagctattgccggtgtaccaaatgtgatcaatggcacccttaaagccaggtgtatagttagtgaaggagagagcttcagattcaccatatgcagatttcaaattaaatgcatgagaacgtccattaacagtgtattctccgtaatcattattcataaaatcttcatgattttggctaatgctaccagatgataaaaagtcataaacaccactgccttggacggaattaaaatctccacaaattaagatggggatctttaaatactcgggataggtaggtctttcatcctttaactggtcagaaggaatcttggaaggcatattacggaattttgttgcaacctgtgcaatctcatccatgagcattgcaacttgtataaccttgacatccctaaactgaggatcccaatgaatatgacaatttgcaacgatcaatcgcgatccattttccttattctcaagaagagtaatcacactaatgttatctttagtcataacacggttgtacatgttagacgttagtttaatgtcttgcctacgaagagatggtgcttgattatattctatcaccatcttttcgtgcatgacatatttagatgttttgaaaaatgtagcacaaccatcgacgatgcgacgttcaacctcattcatagttcgtacgcgacttttcgggaagtggacacctttataacctttcaaactcatttgtggagcaaaaaaagtatcatagttctcaacatcaacttcttgcaaacaaatgatatcagcattataaccacctaattcttgcatgattaaatctttgcgatacgaccaagagagtgcccatgaaggagtatagccatacaatgtggatgtagcataacgttcacaaagcacattataactcataatagtaaacttgagattcttagatgttgtagagggcttgttagaatcagcagccgttaaatctctaacagaggttgaaacattgtcattaacatcatcatcatcatcggaaacaagtttttcccatccacgctcaggaggaggagggccaacagggcaaccatcgcgcaaagcagcaattaaacctgcagtaccactttccatgatttgattcttgtaaacgtcttgaagaggattaccttcaataccaagaattttcaattggaaaagggtaccgagttcggcaggtattacactaatcatattatcaaacaataggacttctctaagctcagtaagtaaaccaagctctggtggaatagttttaatgctgtttccagaggcatccaaaataaccaaattcttcagtttgccaatttcaggtggtaatcgggtaagattattatggtttatgtataattcagtcaaaaaagagaatttaaataaatcagtgctcacatttctcaaaccaataccaccaaggtccaaacaagtccaatcccgtctctctttcttagagtcagatttcgacttttggtcatcaaccgcaacagaagaagtggttgtttttgacgtactgtttaaggtagtaccactggaagtgtttaatgttgttgaggtcgtcaatgttgtagtagtggagctagtattgtactttccccctaacgaggataagccagcagcattagggcctccggtaaaagctccagtccgagcattgtaattcatcgaaaacccaggtcctccacttcgtgctaaagccgcagcattatgagctcgttggtgtggtgaactgaaggacctggactgagttgcaagtgcaatttgctgtttccaatgttcagaaatattactattttctaaagctggcgaattctgtacagataatattgctgcatgttgatggtctggcgtcaacagccccgggtgcgctcctggataaattgtaccttgcgtatacctaggattaaacatagacggtatctcgcaaaatatcaaagtcgagatgaattctaatttacaacattcactatatatacaataaaagtgaggttgttggtgaacggcaagagtcgaaccccgtgatagcttataggtgggatacgaaagctcaccaccaagatttgagacgaaaactcagtgtcctgttaatcgttttttaggtatataattgcatatgaatgctttcaattaattcatattattaattttttttctaaataatataatttagggtccaaacatgaaattattttagcttatgtttagcgctgttatggtctatgtaaatattggagctactgaaaaatttaatatataatgtatcatcagaagtcctttatgaagtttataatattaaaagcttttccggaacatcaaatatgaattattcagcctaatttcgattccgatacatggatgtctcaaagttgttaaaaggcagttagttgttgactcattatcgtaaagtaagataatgtttaatatttaaattaaattttttataatctttttttatataatgccaaatttcttaaagtatggacgggaagaaacatattgaagatcaaaaaaggtttatttatctaactaacgcttattgctaagcaaaggttacgacgcgtaaaggagacattaaatataggggtttgcttcgtataaagagctaccatttgatccggactgtttgagaaggttagtaaatatatcgattccattacattttctcataccttgtagaccaattgacttcattaaatgtggatgttttagcagagaaaggtgtaacaacacttcccgttagagaagaagaaacaggattgttgtaattagttttgaaaacgtcccaagctctcacagtacaatctgaccctccgctaacgaggaccgtggattcgcgagaaaatgacaaagagtatatgttgcctctgtgacctcgcattgtctttatacgccttcctgttcctatgtcccaaaggtgaattagaccttcactgtctttaatcaaattagtaaaatcattagtaataacaaatgtataacataccagcacttgccatagtatgaccatctggggcaatcgcaacagcagttaccggttgggtatgtccattaaaaacacgaacagaatgtcctctatgtacatcccaaagcctgcatgttttatcgcttgatccagttagcacataagcggagtttggatgaaaggtaacgcactaaatacaagtcagtcataaggaaacacatttcttaaaaaagataataatcatacgtctacatcacttaaatgcccagcaaaaactctaagtgggtatatatgatcacagctccaaagttgtgcagtctggtcatgagaagcagtagcgaagtaatgaccaaacggaccaaaggcaacatcccaaaccgggccagtatgtcccttgtaagctaccaaagcagtttttgtgtcaacagaccacagccgggcgctagcatcttcggaacaagatagtaaatatttattatcgggagaaaatgtggtgccgtaaacaggaccagaatgactcagtaaacgtactgagccatctgaatcctctacagaagttgacttaggtaatgattttttgtcagcctttattgaccatagccgtatataactttcttgaaaaccacaggcgatcattgtggagtcaggagaaaattcagcacagttcatgttgttattggtgtgatggaatgtgtacatacaaacactaggaagggaggctctaggtccaagatgtaatcttttactccaatctttcacagcctcaacttctgaaagaatatcaacacctttatgaggaggaagagggatataatctctagacggagcatcttcagcattaggttcatgcagctttctaaattcttttaatagttttggagattggttatttggatcgttttggtgcatcatatcctcttcttctaagtccatctctacaattttttccatttctttgtccattggcatttgttgcagctttacaggttgaagttgagcatctcctcgttcaaaggattggccggtaataccttcttgttcattgataactttagcattttccaagacggtgggacgtccgggaacgatatggatatctatatgctgattgattaatttaatgataattgacccaccgtttgaaacgttttcaaataagaaatgaagcaataaatcaaatgttatcctagaaaaatggagttgatatttattttgccggtattgttgagcagtgcggtcttctgcgacatggcttggaagactcagcgattttaagttttttacatcaaagtcatgaagatcagtatgatcgtctttgaagagttcgtaaaattgctttgctatagcacgttagtaaaattatcatttatccttataaagaattaaatatgggtggtcaagtggaatgagtttcagaaataaagacaagttgtaaactcaatagataaagaaactaataagtatttagaatagttcaaatacccctcttgttcgtagatcatcgaaacaaacatgtaacaaattcgtaacctcctccaatatgaccaacttaccagcttcataatgatcttgagacaagagattaagatatgagtgaacaaatataggaaataatatcctgtgaagttcagctttgtacaattctaacgaactatccacccagtctcgtaagatcgtatacgtgtgtgtgtatgcatctggagtttcctcaatgctttttaacttctcctctactgacacgccagaacccgatgcttccaaacgaagcatcgcctcggtccttgagtatcccttcttcgcaaggtaatccagaacaattctgttcagatcctgcggttgcggcccattagtggcagacatggttaaattctccaatactctagcttgaagaaattaattagaatccaaatataaatctacaaatgaccgtgattcatataattacctgcgcagagctcaaagcaacttgctaggaagtagcatatgtcgagttcgtgtctattaacataccattgtgtaccacgctaaattgggaatttgcaggatttatgaataactgaaatttggaaaggttccacagtgtctgtgagcgttttgatgtcgaaatcctatctaaattactatttcttttgtcctactcaaaaatgaactgtctatgaaattgttttaatgtcaacacaggattgcgaggcaatgaacgctagaaaaaaaaaataaataaataaaagttttgcatagtaaaactttttcaattagatactttttaaaattcttttttgattttcaattcggttttaaaaactttcacttactttttttttagaagtttcatcccaatttcgggatgtttataattttttaattaaattatagtagggccccttattaaaataaaactaaatgttgggttgaaatttaaatagggaaaatgtagaagttttttttaaaaaattcaaaaaattgggaaatttcatatttccttcaaaatcattagtttataacaaaaattgatgtagcattgataaaatgagtttatcagaaattatatgttttttttcctgttacagatttgtatggttttgagtcttaatcggtttatttatttattgatatatttatttacattattgaaatttacaaatagtaggttgcgatgaagtaatggactgtagataataactgtaaactatcaattatttacattcatttttaattatatttaattttcttctttacagttttctttcttttggaccagttttagggatttggtggtaagtactgtgttttcatttgccttaacatccaaagcatccttgctaccaactagcctatcttcatccagcgagacgacttgacagttttttcgttttagacgaaataaaaaccaacagctccaaatttcgactattgcaatgttctaattaatgctgataatattctattggttgggaagatcgattaatctacttttcataagcatataataaaacatctacatgatttttaagtcactaatattttcctcttctcaataattagtaatataactttgcgaactgaaaatcactgtcaaattattaaatcttatattttggtcgatatttgctattggcttagttatttcttgcaacctattcttcatgaacggcgttaaataatttaaatcccttttattgttgtaactgttgctggttaatattttttactattcattcgtttccattatgtctacaaggtcaatcgttactagtaaagtttcttggactccagagaagttcatttcagctctcagttatcctgagcattgctctattactctcgttaagcgactcaaggcttctgtaaaattaaaggacctcaagcaaaatatatctcgtgatgcaccttcgtggacgttcgagcatttgtttgtggctttcaaatgtgcagtcagtaacttagctaagcaatgggcggagctatccactacagataaggagaaaactagaaggatgttttgtacaccttctagattaaatacggctcaccgtcccgaggttttctacctgttagaatgctgtacatatattctcgaacaaatgcaggtggtaaccaaaaatacaagtcatttgtatgattgcatccgtagcggggtttcaatttgtaatcggctcctggacatggagatttttgaaccagctatcagtcttttgatgaaaactcataaaaaccttataattttactgacatatcgggaccacgatgccatccctactgctacccttcttaatcccactttagatgtttcagaaatccaattagaaagctgcctttttgttcctatggttcctgcctcttatttcttaaatataggcactatcgttgtcacatttcagctcaatgtattacgatgtttatctttaagtcaaattaacggtttgtctttgaatacaatcaataacttacaaagcgaagatggcccttttcaatggattgaaagaagctttccttcccaggttcaattggccaattcgagaagagaaattttagctcgtttgttgacaagattttccatgatacaaaataacgccttacaatcgttcaaacttttaatcctctctatagctttatggttgaatattctttcttcccagagagctgacgataaagagtttgatgtaaatcagcttgaaacgagaatcctccaacttttctcaaaagttgtccaattatgtaaaagcgaagatattgaaggatctattttaaataaagatatgacacaacttcatcatcttctggaaaatttatcaaaagaatcgaggttgcatattttgcttcaactttctcaactttattataaatataatgatttccaattaagcgctgcatatgtcattagaggctattctttgtcatttgaagacatcagttttaaattaaaatttttattattttcttttcgattatcaattcacgataatagcatttgttttccgttcaatttaatccaagagttgtcgtcacttcagcagctctttgtcgaaaatgctttaccatattcagaagctctacatttattggattcaatagagcgatcatttcgacttttcaatgactcgacggtttttgatgatactgtatttgctttgaacatatcagaaattttatcgtggatactctcatcggttgtgagggatatccttgtcgaggatgagcttttaaatctccaacttaaaataagaaagtttttgatgtttacatttcatataattaggtcatttagtgagttgactaaatttcaaagttctctggaaggctgtttaaatctcgcagcctactatgaagatgctgaatttcctcaaaagctttccaatcatctttacaacttgtgtgtaaaatcttctaatgttaattatgcacgtgaatgcataagtttgagtatcaaaattgctgtatcacataaattgactaatgatgaaacatatctcctgaaaattttaaaaaattttcaacttcggtaccacgattctttacagttgcaagaaaaatgtgatgtactccatactacattcaatcaactggatctctatgttggaactacatctgttggaaaatctagtgtattggataacattttaaaacgtatattcaactctttaacttctataaatgattcaaatatagaaaaattgcttgaatcaataagctattccttgctcaaacttttttttaaatgtgcaaatgaaggttctcgatataatgcatctgctgctttatcttttaaattatctcttatgttacatgaaaaagaggaggtccttttgcttaaaacaaagtaagtatttctacaattttcttatttgctgacatttagtgtttcttgcgttttggcaaaccatgggtataatgacattaaatttgaggaaatggttctttgcgttattaaaggtgaccaaaatctcctagagcataattccaacaataatgcgaaattagctttaaacgagtcgctattatgctcatgggaaaatttgctatgttacagacgtgcggaagacgatagtaggatacttacaataattgagtcgtggactatttttatatctcgattttcttcggtcatttctcgttgctccttcacagattttgaaattaactcaattttgaattttttttgtaagttttcaatcgtaaccggcgtttctaattgtttatagtttgttttttacatacggtggagccgagtggaaaactaacattcgagttggctttccttgagatattttacgaacttttcaattgtcttcttcatcttcaattttccaagtatctggtcatcattggtactttgcttagtgataaatatatgacgcttggcttctcagggaaagctcacttgttttataccaagtgttatagctatcttcgtcaatgtaaaagcagtccttttataaacttttggaatgtttcttatggtaaatatttgattttaaccggaaatacggataaagggtatgaagactttgtgagatagttactaacgagctcagaattttacagttaaaaaaatattctctttcttctgaagaggatttcaattcaaatggtttaagtcggactgttagcctcaatcttttgctttatgaaaggatacagctaagtgatgccctatttcaactaggctacaccactgtttctcttggctttataatgcaaaatttaaaggttattaagggattgttttctaaaagctcaaaggagcatttcaacggcggaaaatatattacttggcgacttttcgctgtcagtgctcactctaacgtttgcgctgcaaggatttatgagcacatgggacaggcgcgagaagccgaatttttttatcgacaagcttgcagtatttctgaaaagatgccgttttcttgtttttcagctaccttccaattgcgcttatgctcactactaacaagggcaggaaagttagagaagggcgagaagattttatttgatcttactgaggcgatgaaaagcacagatacataccataaacttttatggaattacggagcagctgaagtatgcgcaacaaaatccgagttggatggtgccatatgtcactattcagaatgtgtaaaacttttagaaataataaagtcagaatattaccttttttttaataggaaccgcgagaagtctcttacaaaaggaattaaaagactcagtctttcaagtcaaccaacttttgttacagaatctaatactactgaatttgatgactggtcaattcttcaaaatacggcagccaatttacttcgtctgatttctatgtttgagttgaaaagaggaaacttggagattgcaaaggctttaatgactgactcgacaaaatgctcaattgcaagttttttcaacatagtctcagctaatattttaaaatcaaagcttattgtttgtgaagctgattccacactatttggcgatcccgtcctacgtactcttcccgattctgtaatttcattacctggaatttctcataaatttcagaaaaatcaaagtaaaacaaaagcgcttggagaaaatacaggatttcgcaagggatccaagcgcttagattatttacgtgagaggcttaaaatcaatttgcagaatgttagattaagctgtgaaattatattttctaatgcatatgagcggagctctgtatgcgtttgcagggaggtcaatgaattgatatcgtactcaacaattatgcaaagtgcattaaccacaattggcgaaacgaccgacgtcgattctagttcagcctcattttttttagagatccctaaagctctaggattccatagacgtcgtgaagcacagaaattcagaaaccagcacaaagaacttcattttagtagtttggaacaaattttaaatagtcggttatctatacctgatgtccgtacatttcaagacaattttattgattcattaccgtcgatctggaatgtcgtttctattactattaacaattctggagaggatttgttcatctcaaaaatacgcaaaggtcattctccgctgatttttcgtttaccattgcaaagacataattcacgtgacgcagacgaagaaatccttgtgtttacaaaagctcaaaccgagctatttcgaattatctctaaaagtaatcagatggctcagaacggtaaacattatactagaagagaagacaaagaaacttggtggaaagaaagaagacaccttgatcaatgcttgcaacaacttttagaaaatattgaaatatcatggctcggtggatttaaaggtattttcaatccacataaaattgatacttctttgtttgccaagttttccagtcaatttcaaaacattatagctaaaaattttaacatggacaagaaaacacctgtccctacactgtcgcctgagatcctagaactattcatcaccttaggaaaacctgggtatgaaggttacgaacagcttttagaggatttgatttattttattttggacatttttcaattccgaggtcttcattttgcatacgacgagattgatactgatcaactatctatggatcttcaggatgctctaaatgcctacttcaacaattatgtctctgaagagaacaggagtcatacggtccttgtactggataaatcagttcaccaatttccgtgggaatctttaccatgcctaaaccgacaatcggtatcacgtgtgccttcattatcaattctgcgggacatcttgtcccaatcatttgtcgttaatggagagtatgttgaagtgcgtaaagaagcaggttcatatatactaaatcctagtttggaccttaagcatactcaagaaatgtttgaacataaactagttgaaggtgggtggaagggattaattgctagtcaaccttctaatagagattttattaaaatgctttcaggtaatgatttttttctatatttcggacatggaggaggagagcaatatacaacatcttatgacctggccactctaaaaaggtgtgcagtcactatactgatgggttgtagttctggtgctttgtatgaatgtggctcatttgagccatgggggactcctttggattatttgagtgctgggtgtccaacgttagttgcaaacttatgggatgtcaccgataaagacatcgataggttcagtttgaagatgcttgaaagctggggactctttgaaaataaggcaccttttgtgaattcaacgagtatatgcacagcggtcagcgaaagtcgttcatgctgtcatctacgctatttgaacggagcagctcctgtgatatacggaatacctgcttatattattccataaactgtctaaaattcttacttctttttatttatttgaatcaacattgtttcaacgccttctcatataaagtttctcctatttaacgattaatgcgagtgtatctatgtaactaatgaaaataatttattatctatatatgtactttaatatcacatttgcgtgcaacttacagtacttgggtagcaaaacagtatcggtcattaaaggttccattttgtaaggattgaacctcaaaaagtttatttattggttacaatatcggcggtggccgcagtagtaactctaggagctggttctgaaattaccttggttgttgatgccactatggtctcaggaacagtggtactttcagaagtaggcgccctttctgcagctgatgctggtacaggctcaggctttgcttcagcaggaggaacagcatccgacgtggctttatgtgactcctcttcaacaggaactccagtaggagaagcagaaggagcagatgtagtagcggtaggcttaggatgttcaacagcggtttcctgttccgactttacagtttcactaggctttgagtgttcgtaaatccaagcagcaactttgtcaaggtactcataaacctctggtttcttctcaatatgcaaagaatggtaaaatcctggatacgattgatatgtcttatctttagtgcccgcattttcataaaattcttttgaagaatcggaacaagtcacattatcatcagtaccatgggttataaggagaggaaggaaaaactgaggagctaattcaatagttttcgtacctctgtttagcatgtcactaaagacttgcaacgaacctaccgatgaaacaagaggatcatcctgcaaacgttgattgacggcttcatccctggttatgtgttgactttggacatcgctatcgaaaagaaaattaggatgtaccttggaaaccaaagtaagtgcttttcgtaacaaaaagtttggttcagtgtcaggatgacaacgaagcataggagcttgtgcgattacaccagccagcttgtgacgatgtgtcccactgataccataacgtaaagccaatcctccacccatagaatgtccccataaaaataggggaagctccgtatcgctagcacgaagaatttgataatccaggtcaggaaatactagagaccaaccaccagtacaaccctgcttctttggacctccctttcttgaatgaccaaaacctctctgatcaaaggtataaacttcaatattacgctcgttcaatgcttcaaaaaactctggataagcattgacatgttcgccaaatccatggataaaaacaacacgtgcaacgggcttgtctttaacatcagtccaatcttttgtatataaatcagccatttgagagcaatagagccaaaaacaatcctggaaatatcacctgcgttcaatgttggttctgagcagatagtgtaacgagattgttctgaaggtggattccagaaaggatagaatgattttaatatgaatgatatatatgctttataaaagttatgaaatatgaaaatataaaaactaaaattaaagtgtaaaattttatttggctcgaagcatgttgccaaagctaaagattcatttattaaaataactaaacattatgacctagcttttttttttaaaaaaaaagaaaagaaatatacaaaacatcaaatggctggaatcagctacctttgtacgttcgactttcaacgctaattcgatcttcgaagatgcatacttgacaagtgaacgaagaaaaatgtgaaaagaaaaaccacaataagcatgcaaagaaatcaagcgttagtttcatacttcaatttcataatttggatttttgaagcaataacagaatggcattaaccatatagatagaagtatccttgcaaaagattatagaagaaacaaatacttcagaaatcaatagaaaaacatgattaaagtaaagatttgttttctttaaataatataaaagagttattcgtatagagagtcatcattgaaggtgcaattaggaggtcccagcatgtaaggatttaaaataaatacagctaaatgccaaggtagcaagcataaagtaaactaaatcttccgctagaaatagtaagtcataccttgttagtaaatcattgtatcattagatgatagaactggtttatacatatttggaggtcaaatgaaaatattaaaattatcgacgagtagtagaggaagactgcttctgggaataatgatgaaccttatgaacatgatgtcttcgatgtttcatttcatcgcttgcttggatctgagtagactttttctttcgactctgccttctacgatcagattcgggatttttggtcttccggttcgacagcagtttctcaaccaaaaacataggatcatcttgaggagcgcgatactttgaagacatattattcgatgtttcatctatgctgattttgtctgttttcatgtaccaagggagtggtcctacaaagaaattagtaatgcgaacaaaatcaagatggtttctccattggtaaaacaagaaacataccgagtccatgccgttctttcataatttctagatcatggcgattttcgctataaactttttgacgtttcctctcctaatgctagtgttagcactgcaaattattaaaaaatcataaattagaagatatttttaaaagctctaccttttcttcctgttcagcccaaaaattggcaaattcaacttttggctctgtttctttcgaatcttcttcgtaaacagtacctcgtagtcgtgctatccgacgtttagattcctagaaggcatgtgtgagaaagtataaataagagagaggttgataattaattacctctaggtcgttttttgcttgttctttgtccgctgaaagtcttgccaattcttcatctcttctaactctttcgatatttttctcattatagactagaataaatattaatgattgacctttgggttttatagggacacaccgttccaactcttatgcttaagcagattcagcggcatttttagtttagagaagtcgcttttatttcaaaattcgacaataatttagtccaattgtttattcaaatataaatgttcattaatgtacagaaaaatattaacatcgaaaggacttcaattaaaaaacttggaaaagtgaaggatcctggtctacacgtatacctaccactaacaacggtggctattcactaggttgaatattatcgtgaagatttatttttttcgttaaagagaattaaattacttaaatttttttgttaattgattagttcttgtcgtgatatctttggtatttagcgagagcaacaaaacagaggtccaaagttcatgactacagagcttactaatgtatctttggaagaagctatcacggaaaaaacaagcgaaaatagaagaaagagagattcagacgttcttcaaactgaagaagtggatttggtatgtttaaactcttgccgtttttataacgaaacgcgttctcaattgcgagagaaaaggttctttgttggttgaaatttgtatattaatattttatttttaatagtcaaatgtgaaaagaattcgggcttctcgaaatcaagataatagacccgaaaggcaatctcgacttcagcgatcatcttcattgattgagcaagttagaggtaatgaagacggagaaaatgatgtcctcaatcagaccagagagacaaattcaaattttgataaccgcgtgggagtcattgagtgtatccatttggtgaattttatgtgtcatgactccttgaagattaattttggacctcgtatcaactttgtcattggtcataatggtagcggaaaaagtgctatacttacaggattgactatttgccttggagctaaagcctcaaatactaatcgcgctccaaacatgaaaagtcttgtaaagcagggaaagaattatgcccgaatctctgttacgattagtaaccgtgggtttgaagcataccaacccgaaatatatggaaaatctattacaattgagcgtactattcgaagagaaggatccagcgaatatagattgcgttctttcaatggaacggttatttcaaccaaacgcgatgaactagacaatatctgcgaccatatgggtttacaaattgacaatcctatgaacatccttacgcaggatacagcacgtcagttcctgggaaattcaagtccaaaagagaaatatcagctctttatgaaaggaattcagctgaaacagctcgaagaaaattactctttaattgaacaaagcttaattaatactaagaatgttttaggaaataagaaaactggggtctcttatttagcaaagaaggaagaagaatataaacttctgtgggaacaatctcgtgaaactgaaaaccttcataacttattagagcaaaaaaagggggaaatggtgtgggctcaagtggttgaagttgaaaaagagcttctgcttgcggagaaggagtttcaacatgctgaagttaaactttcagaggccaaggaaaatttagagtcaatagttaccaatcagtctgatattgatggaaagatatcttcaaaagaagaagtgattgggagagctaaaggtgaaactgacactacaaagtctaaatttgaagatattgtgaaaacatttgatgggtatcgttcagaaatgaatgatgttgatatacagaagcgtgatatacaaaacagtatcaatgctgccaagagttgcttggatgtgtatcgtgaacaactgaacactgaaagagctcgagaaaacaatttgggaggttctcaaattgaaaaaagagcaaacgaatcaaataatttgcaacgtgagatagcagatttaagtgaacaaattgttgagcttgaatctaaaaggaatgacttgcattctgctcttttagaaatgggcggcaatttaaccagcttgttgacaaaaaaagactcaattgccaacaaaatctcagatcaaagtgaacatttaaaagtattagaagatgtccaaagagataaagtttctgcatttggaaagaatatgccgcaacttcttaaactcatcactcgggaaacaagatttcagcaccctcccaagggacccatgggaaagtatatgacagtgaaagagcaaaaatggcatttaattattgaaaggatattgggaaatgttatcaatggttttatagttcgtagtcatcatgaccaattgatccttaaagagctgatgaggcaaagcaattgtcatgctacagttgtagttggaaaatacgatccttttgactattcttctggtgaacctgattctcaatatcctacggtgctcaagattattaagtttgatgatgatgaagttctacatacgctgattaatcatttgggaattgaaaagatgttattgattgaagaccgacgtgaagcagaagcttatatgaaaaggggcattgctaatgttacccaatgttatgctctcgatcctagaaaccgtggatatgggtttcgaattgtcagtacacaacgatcttcaggtatatcaaaggtaacgccttggaatagacctcctcgcattggattttctagctcgacgagtatagaggcagaaaaaaaaattttggatgatttaaagaagcaatacaattttgctagtaatcagctaaacgaggccaaaatcgagcaagctaaatttaaaagagatgaacaactgttagtcgagaaaatagaagggataaaaaagaggatccttttgaaacgtagggaggtaaactcacttgaatcccaggaactttctgtgctagataccgagaagattcaaacccttgaaaggcgcatttctgagactgaaaaagagctcgaaagttatgcaggacagttgcaggacgcaaaaaatgaagaacatcgaataagggacaatcaacgcccggtaattgaggaaatcagaatttatagggagaagatacaaacagagacgcaaaggctctcatccttgcaaaccgaactcagtcggctacgtgatgagaaaaggaattctgaagtggatattgaaaggcatcgacagacggttgaatcctgtaccaatattttgcgtgaaaaggaagctaagaaagttcagtgtgctcaggttgtggctgattacacagcaaaggctaatactcgctgtgaaagggttcctgtacagcttagtccggctgagctcgataacgaaattgaaagactgcaaatgcaaatagctgaatggagaaatcgcacaggtgtttcggtggaacaagcggctgaagactatttaaatgcaaaggaaaaacatgaccaagccaaagttttagttgctagactcacgcaactattgcaagctttagaagagacgttacgaaggcgtaatgaaatgtggaccaaatttcgcaagctaattactctgcgaacgaaagaactttttgaattatacctcagccagagaaattttactggaaaactggtaattaaacaccaagaggagtttttggaacctagagtttacccggcgaatcgtaatttagcaaccgctcacaatcgccatgagaagtctaaagtcagcgttcaaggattatcagggggtgaaaaatcttttgcaacgatttgtatgctgttgtcaatttgggaggcaatgagttgtccgctccgctgtcttgatgaatttgatgtgtttatggacgctgttaatagactagtcagtattaaaatgatggtagattctgcaaaggattcttcagataagcaatttatttttattacacctcaggacatgggtcaaattggtttggacaaagacgttgttgtttttcgtcttagcgatcctgtcgtttcctcttcagcacttcctccctctacggcgccatgacatttctactattttgatagtctattgtataggtatttagaatttatttattagatatatagcaagttcatttgtatattaaatttgactacgaatacgcatttgtcggccatatcgtatacttagcagaaagcgagaaatcttagtgtatttgttgttaccgaaagtcatgctacttatcggtagaataaggatggatcgaatattcaattagcagagtatatggtagggtagggttgtgtgactggtcttagtagaacaacataaccgaaaaactgacattcctagtgtcaactcaccgcaggacatcaaaatgccaactcacgtatctaagactcgtaagcttcgtggacacgtttcagctggtcacggtcgtattggcaagcacaggaagcatcccggtggtcgtggtaaggctggtggtttacaacacctccgtagtcacttcgataagtaccatcctggttactttggtaaggtcggtatgcgccgtttccacctcatgaagaatcccttatggcgtcccactgtcaacttggaccgtctctggactttactccccaacgaggctcgtgacaagtatttgggcaagaacactgaggttgctcccgtcatcaatgtccttcaatccggttatggcaaagttttgggtaagggacgtcttcctgagacccctgtcattgttcaaactcgctacgtttctcgcagagctgaggaaaagattaagcaagccggcggtgttgttgagctcattgcataaacaaataacaataaaaagtacattgagcggttaattattgtaggggcgtcttttgattttgaaagtaatgtatgtagttttgttgaaatccattgatgcacttgaatagagtttattcaagcttctatcatgttttttgataaacattctatagcgtagcgatttataagtatattgacatgtttaccctgtaacctacttattgaattttcctcaattgaccaaacttgtttgcaaaagcaatatattagtttttgttgggactgggtgaatttaattttgagtagtgatattattgtcaaagttgaatatcaagaaagtctgttataaagtctttaaaaaggtcattattcaatgtaatttgttgatgtgccatatgttgttgataaataggtaaagatagcataactactactttttactactacgaagaagctattcagctatatctacgtaaaatcgtcatggtaaagaataattaaatagtttttaatagaggagaattttcgttagagcattggtgttttttttttggaatcattctttaatttcagagagaattggcgtctgtaacactttcatctacacttgaccaaatattttagtttcctgggctaacaagacttccaaagatggatcaagaacgtaaactgcaatttttgttatcaatagcggcagagacatacgcgattagtccatcattgtcaagccactacttgaggaggatgttctctcttttggaggaatggaatttggaaacagatccaaagacacttttgcacgggtgttccaaatgtggatctttgtttatatttggccgtaatataaaacttcgtacaattagttcagagaggaaggcacggacagatttgaagaaaggagaggtctcaaggttgggcacaaatttagaaattaactgcttagtctgctcttatgttcatgaaattcctttaggggtacctcttcgcttgcaccaaagcaaacaagcgttacgtgctaaagctattgctgaatcttcatctacgaaactcgaaagtcgaaaatctgcccataatgccaaagtaaaacaaagacaacgtttgagagcctccggacttaatggaattttggataggaagaaaaaaaaagatgaggttgcaaaaagcacatcttcattaagtttacaagactttatgtcaccgatatgagtgattctgattgatctatcaattttctatctagttgtcatattcttatacacatattttccctctaaaatgaggattgaaacttttctgacatttattacagccttcagcgccgtgtacttcttcctcttttagttcagctcatttgtcttaatgtagttttgatttaaaatttgaacttcccgttttagatttgatcgttaccttttcccgttgtttacttttatttacatttgtattagaactattcgtttgggttggacgagtttagacaaggggccccttcttctatttgtatttacttttaacttatttatttactatttctttgatttgtcacttgtatggtgcgaaatatatacggaaatgtcaatcacagaatagcaaacaaatcgtcaacttgcggttattgtgcgtagcatattttcagtagttttcttttgacaacgcccttatgagcatatttttaagtttccgattaatcgttcattcctttacaagagaggtctctcactgtctaccacctgaagttgagcttgtgtcaattaccaactccagttttgcattctgaggatgagtaatagaattgggcctcagagatccacaaaaactgcagcgaagcttcggcttcttccttctacagaagaatttgatgattttagaaggcaggatacggggcgcgaagtgtactcccaaattcctcaaatagaagggtcaacggcaaaacgagacgcagagcatcttggaaaacggcatcgagaattcttaccaagagtaactgcctattgtacatgcgatacatttagagtcgacttgctgtttaagttttttcaatctcgaagaagtagtcataaaacaagacctaaacaatttgacgaatggttagttaatatttttgcatttttctcattctattgatccttattgatatttacttgaagaggtttatctaacattataacagtatttatagtccgtatagctacaataatgaagagacgacagacttacttcctgacacattggagtcctcccgtggaacgttaaatcgagaatcttctcaagaaagtctacaaagtatttttgaagaatccgggttggacaggaatcaacccttgtttcgggaagtgttttgctttacttatggcgttgttgttttatggggatacacaattgatgaagagcatcgtttcttaagagaactcggtcgctttgaaattgaaaaattaagtatgcaaattactttgggtgacagtcattatcatattgttgtatctttaagcagttattaacatttgtaatttttagagatcgaagatatggaggtagaagagtttaactactatataacgactctttatcaaccaagggtatgaacatttttattgataaaaatttttgtctttagctctttttcctcatggtgaagctagtcgactaacagatatagatattcaacgactttatagcacttcgggatgcatccaactacatgattcgtctttcaatttcacatgctattgctcaatcagtcaaaatatcactatttgaagagctggtcaacgaaacaatagatgctactaaagatacaccccaaatgattgccgagactggcagagtgaatttgaaaagagaggaaattatgatggccgtaggccagttgtttattttaagaattaacattaatttacaaggaagcgttttggatagtcctgagctgatgtggacggagccgcagttagaacctatatatacagcagcacggtcttacttggaaattaaccaaagagttgctttactaaatcaaagagtggaggtaattggagacctactttcaatgttgaaagaacagataacacatacacatgatgaatctctagaatggattgtggtaatccttatggggctgttggtgctgatagccttattcagtatagtggtacgtttggccgatggtttcaaattgaatgacttccgtttagtaatcaacaattccaacaaatttattttactgtttgctaacacattattctacataggtggattggaagctgtttcaataacaaccgaagaatctttcctctttttacattatgtttacataattgaagaaatgggaaagggcaaaaaaattaaaccatatttatcgagttgattacgcatatgtttcggctttttcctttagtttttttttagtttcggttagttcatgatttattgacattacacggtagtcttctataataatcctacttaatagaagataaagctctttttttctcttctttgaagattcctagttgatttcccacataaaagaacgttgaaatgggttacacaaaaaaggacaacaacagccatagtacgtagatattgtattgatttcggcacaaagtatgacttttcaaaaaattacataaggttttttttcttcggttgcagagtccaatttttaccatcaatcattacatacttcatatacttagtcaaaaaaaagcatgttaacgattatagatcaatggccggcaaagtgattttaaaacgaatgaagacttaaaaataaaaacatcaagcgcctgcctaaaacaagtattatgtctcaccagcttccttttctttatttaacccttttttctcgagcactttagatagcaattgcgcttcatggcgataccgctgaatgtctctttcaacgttgtaaattttcacagcatacatttcgcattccttttcaatttccgagacttttcttcgaatccttgcggttttacgccgatacacgtcctctatacgtcgagttcattagcaaaaagtcgtcagacaaaaatcggtacacaccttcagtttcttgaagcaaatttaccacctacgcggtcaataaataattacaaataggtaataaacctcctacctgtggatccattcccgaaagcttcacgttctcagtttctggtgaagaatgcaaagctagtttgcttaaaatctgtattgtatttaacgaaaaactgcttacttcgttatagaagattgcctactacattacgcaaccaagggtttataacgatacgaaccgaaaccgttatctagttttcttacccatcagctgggtattgctagtgaaaaacaaatgtctaatataaagctaatccttttttggctgacttctcttatccattcatattacatttttgcttcttttgggtagaaaaagaatggatcatgtctcacatttacaatacgaaagtcaaatttcaataaacaaaggtacatcatacatgtgaacaaatatttcaaaaacgatttatgatcatttcataacaaagaatcatgaatttacttcggataagttcaaaaatgatattgtcagccactgattcagagtaaatctgtcattcgttttataaatgcactgtcataaacgaatacttccagcagaaccaggctccggttgcacagaaaatttcaagtaataaagcagtgtctcattggcaaaataattttcagaagggaaaaagcgaaataaaacagaaagaaccttctgaaagaaaattgaaaccaaataatgttcaacaacgaaataaaaacaaacagaaatgataaaaagataataaaaaatacaagggtttcaccttgcttctagcattgaattgaaacaatacagacatttatgagtgggctgaaattaaataaagaggggcgaggaggaaaattagaaaaaagagaaggggtcaaagaggttttagacgtatattttttggtaatataaaccagtctaagatagaggagttaatatttcatgaacaaaagcacatagaaattgtttaaaaacaacggcaataataagaacccggatacacaatccaagtattaaattaaagatcccttcaagtacccaagaaattaagttattaatcaaataaaataataaacaaagacaaagaagcagagtttcacttaaataattgtcaaataaaaatcgacatgtttttttcgaccaaaaaaaaagaaaacttaaaaagaacgaaaaataataattatggggagatattaaagcgggcatttgttttaaaagcaaaaacttttttaaaaattggattcaagcaaattcttccaatatggctcttgccaaatatcatcattccaaattgactgtggaacaagagagttaagttgaatgagaatgtgaaaatcttgaatagcttgagcaagtcgttcatcctccccatcttcttcgttcgtagatagtatataatcgttaaaagacttgtcgccttttaaatcatcgttacacttgataaaatcgtcataaacaactttccatgcatcaaaatctttaaaagctttaaagaaaaccttgttgctcagcatggaagggagagcaacgctaatccatttagcataatcaattccattcgaccagctatgcctccacagatatacaaatatgtccataagaccagaggcttgtgcatattggctgtcatcttcggtcaaccacaaacacaaggtagccacagcactgattacagttacatgtgatgctaaattgtcacggtttttattgttatcccatgcatcacgaagaaaatccatcgtatcgctaaacaactcagtaagcgatcgctgaagttggaaaaatttatcaggctcaattctttgggcaagaacgtcacaattttcacatagatatcgaatgaggagtccaagaacttcatagcattcacaaaccgtgtacgacacagttccatgctttcctttctgaccaactgccttaactagcattcccagacttcctcgaatctcagcagagcagcgaccaatcaccaaaatcataaacccatcatttggcataatagaggcgggaccagcagctttaagaaggttagaaagaataacggtagctgaagaaagatttttatcggtgataaagcgttcaacaaccgcatccatcaaaggctggagattagcacgaatggcctcggaataccatgattgaaccgggaatcgcgaaaacaaatcgctaaaaaacgagaaagtacagtccaacttccatccgcgtcgtttgtcgataccttggaaaatgggacgcatatacgtctgtacgttgtcgagggcgtatagtgcgtttgaaaggatttcaaatgcttgttcaaatggaaattcgttgataataaatgatgtatagtaaaggagatacttagctgattttgggttggaagacaaagtacatataaccgggatacaaagatcataatgtttcaaacaacactgtagtaaagtagaaaccctttttttcacttcataacttcgtaaaatggcttcttcactgcagaaagcgagaaggatggagacgcccaaatctacgtactcgtaatgagtggaaaggagcaagcggtccaaaaacttcatatccatcctttcccagcatttgaagatgagattgggatgatcattgagtaattttgcaagcatggtcaatgacacaaatttacttgtatcgtcctgggcatgcagcaaagaaaaacagttttccaacaactccatagaacctctcgactcgccggaagcatttgaatcctcgtccttatcagtaacaaaatgaacctccgttacatggtcctcactcagcttttcagacgcatacgagtcatcttcggagagaagctgctcatacgatatagtgcgcacgcctttgggacccttgtgaagatgaaagtgtggaatatgcattaaggtgaattgaattgtacctcaataacctattatttatgaaaaaaaaacttaaaaccgagctcttctcactgcagtctacgacactaagtaaactttgacaaacgaaaagaggaatgcaccaaaagtctaacaattttcaaatccaacaaattttcgttcaacaatccgaaatctccaaacttctcacctttttcctcaaattccactcaaatctgccagaaaaaaaatgtttctacttcaaattacaccaatttttcttgattaattaaataaatatcgaatttgtagtcctctacgactttttactctttcaagctaggtgttccgcttatgctgaggcaaaaaggcatgccttgagttttgtctccaattgacgaataaggtatgccctatcttctggtactttggaaagtgcccccacttgggataaaaaggtagaatgcccccatttcctttcctatcgaaggccttagtggtggttgacatagcaacatagcaaatgtgctttatttacataatagatggcaaacgactctagctactacgtgactctaaacaaagcaaataaacaagcttcaaattgcagagattgaacgtgttttgcttgtaatttatagttgaggattttttctgtcttagtgaatccattttttgaagaagcgttgtggtaaaaaaaatgtctaatactgggttacccaaaccatggattgtcaagatttcacgctccagaaatcgtccctacttctttaatactgagacgcatgagtctttatgggagcctccggctgccactgatatggctgccctgaaaaagttcattgcaaacgagttgcaggagtcagttacacccaccgaggcaagcaattcacccaagattcgtgctagccatttactcgtaaagcatcgagaaagccgtcgtcccagctcatggaaggaggagcacattactaggagcaaggaggaggcgaggaagctggctgaacactatgaacaattgctaaagagtggctctgtaagcatgcatgatttagccatgaaagagtcggattgtagctccgctcgtcgcggaggtgaattgtatgtattttgatatactgtaattaaatacgagtcgcaagaccgacagtatatggtggtgccacacttggtgataagctcttgttggtttgccaagtgtagtctgattttcaactggaacgatttttactaacactatgtgtagaggcgaatttggaagagacgaaatgcaaaaaccgtttgaagacgctgcgtttgccttgaaacccggtgaaattagtggagtggttgaaacgagcagtgggtttcacatcattcaaagacacgcttaattcatttgcaaaacaattacctaataatattaatgagtatgctttatttcttattttcacttactccctttccgtatgcttgaaaaagcaaacaaaatgtttgtcttgttttgtcacaaatttatctcttctgatgattttttacattttgttgaccattttcccaaaggagaatattcacaattgtcgctttgtatgtcccttatttctgacgttcacccgtttataatacattttaacttagtatttaagtgtttgcccattcatgaacacgagccagcttactacctaggttgaaaacaaaatgatttgatttcgctttgctattgattgaaaaagctttgatgaaaaatgataaagtaactgattgatgtttcgagatttctgttcactttaaaaattttcacagattttctactttacatgaatgttaactttattagaaaaagtaattacaaatttatcttttgcatatttcatttgaggttttatggttgtagtcatttttttatgctatatttatttatttgtttatttttctttatacctacacaagtcttttttcgttttttttctctaaccaaccccatgcactgatttacaataaaacaattaatatccggcaaagtgaaaatgcagcatcccattttttacgctatagaggtgagtagaattcttcagcatttggaacccatttaataaatttatttgaaccgacttcgtactaaattctatctttctgtattttataaagcgaatccatatatcagctagtaaaggaatatttgataatttataggaatccaaatgtgtttacacagtaggggcctgaattatgaaaaaaagtgttcttttttaaaaaaaatagtaatgataataatttaaattagggattattttaagtaacgttaaatctcatcttgaacatttagtattgtaaaatgagttgtattaaaataacaattgtatagctatcagagtttattattaaacttcgttaatacaattaaatctttcaaaataaaagaaatatttttttttaataagcttaagaatctattattgggatagtttgccggtcgaagcaatgatactttagtcaatgtaaaaaagaagtcaaacagttaaaaacctttaaatttgaaagttaatttcaatcaattgttgatgtgccaaaaataataaaaataaatagaaaaatagctaaggtactgttgactactgaaggaattttttttgaaacaaatatggcattcgattcaaaactatatgttcaatttaaatcgaaggttttagaggttatactatcaatacacctttgtttgtcatagctctatttaatattaccttagccagataagtcagtcatataacttttgagcattgaaaagaagttcattctggatcaagataatgagtaatcattgaatttacgccttggatgagtaattcactttaatgaagcgatacattcctcaatagcaaagataaacggaggtcatgcattgaaagaatctttttcattcttaatataccgaattgccaggctcttagtctctgattaatactattctattctattctattcaattttcaatttttatgtttgtaagagaaagtataaactgcatgacaatgagcatgcttcgattcatttgcaatgtaactggaatcccactgcataccaaaactaaatagagtatcttactcaatgacttactcttcatgctagttagatcaatttaaatatcctgagaagaagaaattgatgaaattatttatcctttttaatatctctcaatttttttcataaaagcccaattaccatccatggcttctgctacactcccaatggattataagacgcctttcggatatgcttataaactatacgtggaaggaaaagatgaacattcattatatatacttgataattatttaaagaatgctaattgtagtgaaaacacttacgaacaagcgttaatattgtgcctgacaattatgtgtgaacaaaggcgttcttggacagaaatggaggaaaaattgttacacaactatcaagggaaaataccggattcaatcgtggtaaattggtatgtagtattttaaattttgatcagaagttttaacgtgaccaggataattacttatttagagaatagtgaatttacaaaagagaactacgcgcaaatgataaattctttgtatcgctaccaagacgccattttgaaaagtgaattgaaagattcaattctccccaaacttgtcaattgtgcttgtagcgtgcagcttactgagccattgaaagccatattggctaattctcgtggggaacttgaaaatgtatgcatgtttgtaacaacatttacgtttgatccttgtcgctaactgtttagtcattactgcttcggattcaagcacaagaggaagagttaaaaatgaaccttgagcgttcaaaaactcctgatccctcggaagatgaaggagaatttgccttgaccctaaaattgcaattttcaaaagtctctcgtttaataaaccaaggtttaactccactcctctcgcgtttacagttaattgacaaaaatataaaaattgtaggagcaatctttggcattattcttttactctttaggttaaaaaaatacatctcgcattcgaaaaaatctgccttttctccgcaaagatggaaatttctacttgaccaatttttacttgctatttcctgatgtaagtataagaaggcatgcatcatatccatgtatttttactattttctatttaatctagaaagttaaaagattgtgatgaagttgattgattctaacgtatttccttgtttaactttttcgagttctttccctcctaaacttcatttttactacttcaaaaactttttttacttcatttttgaaggttctaaacttttatgaatttcatcttctactattttagaactgttaatttatgctagtcattagaaaattgagaaaatcctcgcttgatatttgcatgtaacatgatagaattaattgaaattgaaacgacagcttctttaactcttttttacgtttgttattatctttcaatttctgatatttttatttctctataatagtgtaaaataacgtatcactgcatacagaattgtatgaactttgcatttcataaatcaaatagtgaaatatagcgttttactattttacctaaaagaagtcctgaaaggaggactagatatttgagctatgaagaaaaagcaaacgaaagtaaaacaaacagttaagcttgtccttcgaaatcctttatctatctcttggtatgtaatctattgcttgtattttcacacctattttcgtactgactaaccataccgttaggcctatcgttgatgcaaatacacaagagaaattagctcaaacacttgtgcaatggcttcctgcctctcataaagacatattagactcgaagttgaccgttggattgaattctgtcaatgaattgctagagagatgttgccaaaatgcgaaagacgttacgcaacctgcggtcgtattcatccttcatgaccaggattccatgctagttacacacatgccccagcttgttgcaaatgctaacttttatggctcctccaaatgtcgactagttccacttggattttctgcacaagcgctaatcgccaagaaattgggtttgagcagggcgggtgcgattgccgtacaggtaaggttactggtcaattttagactaagtagaatgatattgactatattttaggatgattctcctctatggaaatatttaaaagatttagtgatgaatatagaagagcctcaagcacgctggctttccgaaaatcctgagtatgaggtgaccaaggttgaaaaaatcattacaagtcaaaaggaaaatcaaggaacaaaaaaagagggtaaaaacgaaaagggaaacgagtttaaaaaatgaaaaaattttaagatggcagatttcttgtagttgtatatgtaaatatatatgtttgcgtgtgtgtatgtgtaaatgtgtaaggtatgaaagattgtgtgtagattgagaaagtatgaaaagaaacatcgataaattgagttttaagcaggctgggcaatatctatttttcgccaagaatatcacgacgagacgagggctctaaaaagtcaaacgatgtcaacaaagctaagtcttgaaataattgaaattgtttttgaaggatgaaaaatgattgaaaactgagacattaataaaatgtgagatagaaatgaaaggtgtggtttaacttacgattctgatgaaatgaagcaatcaaacattggagttcgaagaaaagaatgtgcaaattggtcaatgcctttttgcgcacatgaccattcaaccggttcatgatcaaatcgggaacattttttgttgaaagcttgaaagataggttgattgagaagtaaaaactcagcaggcgctctaggtattcgaatgcgatacgaattattaaatgtatttagcaaaacttgcgcattccatccagtgcgtgtaagatgaataaggatgccaaccattttgcgaatttgatgcttcataaacgactggccgtgaaagattagcttaacccattggcgatttaacttgtcaatgtgaaggttatccacacgcacatctaataaaaaccttcgagaactggcgtccgaaaaacccttctccgttgtataactgtgaaatcgatgggtgccccgaaacatcgtacacgcatgctttagaaagtcgagtttaggtttggataaacgaaagggctcggacaaggaattcgcaacacagtcttgtttgcttaagttagctaaatgggaaagtgtttcattaatggggaatgctttttcagatgccttggcaattacataggcctcgagagtgcaaggacggggagtaagtagagaggagacaggcaaccaatactcatatacgcgactgtcgcacacagtgtgtggagaaaacgaattaaacgtcctcgccattttccatacacgaatacaaggtggtaaaatatcgttgaccaaattcaccacatgaggtagaggttgattgtccaacactttcaaaccaagaacattaacaatggcatgtacacccttgtctgttctagcagcagaacacattcggatcttcttgggagagtcagcattcacctgaacaacggcgcctactcgagcgaatgcttggaacagtgtatcttgtatggttttgacattggcattgtactgcaaaccagcaaagccagtaccacgatagctgacaacacagtagaccattcgtttccggggtttcaccgaaatcgaagaaaagaaaacccgatgtcgttggagcaagcaaagcacagattggttggcagagaaccttgaaggtcttaagagactatgcatagtttgaaagatgaaattaactaagcaagtttttaatgaaagagaggaaaggtactacagatggcatgtgctcaagcaaaagttaggatattaaaaaaatattaaactaagggtagaagcacttcaactgtttttcatgaacaatatagaatattactataattttttggaaagagccctagcttccatgaatagtcttacccacaataccctgttgtttatctattttcttttactaaaccaagctgtacatactagataccacaaagaaataccttgtatctcctttctacccctttgaatggacaatgaagccgaaaatttgccgtttttagaaggtccttttttttcaacttttatcgaaaattaattttttttcagtcgtttcaaaggtcaacctacaaaactaattcttttcgttagcaaccgctttcttatcaatctttgcttctttatttactgttctctgctaaattttcgttgatttatttaaaataccttctaaaccatactttttcttactacccgggttttgacaaatttttttctatgcagctctatccggcaaatgttaagggattgagatatagtgaatgttgcatcttaaccgctaacccatcggttcaacattttgtcatgcatgatgatgctggtgttcctctaacgtacagcgtttccacactgcacgccgaacttaccgaccacctatacctcccaaccaccaggaaaacagtcgcagtaggcaagaaaacgctttttgtagtgcaaaaaaaaagatttaagccggaaacatagcagaatagcagaaatttgatatttactgttatcatctccattattatttggattagttttcgattgtcctttcattcatctaataacgcttgtttttcttttttcttttttgcattctcagtcttggttgttttgctatttattgcgttcctcggtttctccctattaaatattttcttttcattgtttttacggaaattctcattttttcatcttaggggctcgttgactcagcctgcacgacaaggaaaattatatccgtttcggaagcacaacgtgtgtgttgaaagtcttacttttcttttttatttttctgtaccctttcattgaactttagccatttgttgctttgttgaattttggccataaatagtttttcaactgggtttttattcgacctcctttcattattcatttcattttcatatctatccatttctatccccactaaacaattttgtgtttttaggatttccctattctcaatccataaaatagtcacgattcgttttcattcagatacccggctccttatttttttttttttcgaaattttattcactcgtttgatttcgttgattcatttcttccgccttttactcattacttaagggtatttgcttattaaacgtttggtctttttttttgcccatctttttgttcatacaaagttttgtgacatttatataatatttagtctcttcgtttttgtgtgggttaccttttttgttttattctttttcttttttttttctctttcttccctctttgttttttcttctgaccctattttatgccttattattattttgatcaagtttcaatcattttttcacaaagatttcatattcactttacttcttagtttttttctttttatttgaaatttcttggaatctttttgccttttttcttttaacttgatctctcttatttaacgttacttagaaaagcttcttttattttgcttttcctttcattcttcgctcctttataaaccgtgttcatacttcttttgcttacgttttgccaatcttcccagcaattttacttctatcttgattgttcttgttgttggatatttactctttgttgatagcggtatattttatttgcttctcactttttgcccgattgctttcctttgatttacctctccaaaaaaaaacaagtgtcttttgtttacttgtttgtatatttgtttatactctgctgattgaaaagttgattgtttattttatttttccatctgcaaccatttctttttttttgaaaaaaaaaaaatcgctaactgatttttttaagcatttcgaataccttcgaagtctttttatcgatacttttgacgatttcttcctcataagccttgccctagactttttgttagctcggtatttttgcatatttcagtcatctttttttcattttcagtttgtgttttttgcttcacagttgtatctgtctctcttttagcaactagaattatttgtggtggtcaacagtttaccctttgctctcgttttcttgaagttacagtctttcttttattatcttcgtccagtattctaggttgttgcccttctaattctttcgcgtcaagtatttggatttttctaatacttgctaacaatttttactgaattttttatttttcttcattgcccttgcttatttttattacttacacactttctttttagtcgaccaactaggtttctaactttttactccacttattaactatttcgtgttattaagcttgaagcctcatttattatcgtttggggtttatttaacaactactgctatttcatttgtgttttacttttaggcatctattgcttattttggttactttatcaaccactttgtcattcttttttctcttcttttcaattaccattatatataatttgcaaaatgtttgtgggatcaccgagcgctattgaaaagcctttatcgttatccagtaagaccaaagtcggggacgaaaccgagtttactgaagatgcgctacgtggttcatcgttggttccaaccggtattctgaatggagatgatgaatgtcatgctcttcacatgtctcctcaggctattcacagccaagctgggaaagctgaatctgacggtttacctacttatgcatctgtggaaaaatccacaactccgattggtagactcctctctaacctcaacggtggattagcctctgctcctcctaaggttggattcggttttcctagatattatgctttgcggattgaggatttacctagggacttaacacccagagagtttttatgtacctttttattcgctacgaatgtagtatccgtcgagcttaatcctgtatccgtggataatgaagttgctcatggattggcggtgttttcatcccgagatgctgctgcatctgctagagacactttgctatctagcgatgtttattccgcgtgcagcatgataattttagacaattatcgaaagggaagtcaaacaaatcttagcgacgaaactgagggctctgagagtagtgtttcatttaacagactgtctcgaaaccattctccaactcgtccactgttaggaaatcgtgatcttttccgcaggtcaagtaatcatgtgtcagccagtatgcctactgcaaatcattcggaatctgcttatcgtcattcaaaaacacctttgggtgatagcacttttcaggctcctaacaatggaggtagtttgcattccgataggttgtggtcttctttccctgtttcttatcctttaacactcgcgaatgtgttagccaaggatgaagttggttcacctacgtggtcacccactccttccaaaagtagtaccaatttgcgtcaagacggtgttcctccgattttgcgatttaactcattatctattaacaccaacgtggcgcgcaattacctttcatctgaaaagggttatagcgctcatacccaaaattctagtgctcaatcaccccatcctcgtgtcttttcggcaaacagtgcattcagtacaacaagccctcctcccttgacaccatcaacatcaagagactacccattttcagcttctaccatttcaccttccacaccattttcggcttattcctccagtcatggaattcatcaacgcatccctgcttctacccccacgaataccaaccctgctgatcaaaatcctccttgtaacaccatttatgttggaaatcttcctccttctacttccgaggaagagttgaaagttttgttttccactcaagttggatacaaaagactttgtttccgcactaaaggcaatggccccatgtgttttgttgaatttgaaaacattccatacgccatggaagccttgaagaatttacaaggtgtttgtcttagcagtagcattaaaggtggtattcgtttgagtttttcgaagaacccattgggagtgcgctcatcaagttcatcgcataacaaccataatggaaacgttcgtaaccttcactctggttccatgaataattacaatacagactctttgcttaatcatactggtggacataacgaagtccacgccagtcccagttggggtaataatctaatgtatggcaaatagctcatctagcattttctcgtcttcattttatcattattcatcaataccttgcaaggactttaggtccaaattttttaagcatattgtttctctttttttttttttgagttttgcatattgattctttgttaatcaaaagttgcgatctattccactttgactgcatgcaactttaaccatctgttaagcttaattacaatttgtcgatttatgcgatctgttttatttcactcttatataagatgggtacttgcattgtttagttgtcattaggatttatcatttgctcatcatttccatatacttctgctacacatatcaatttacataataatatcgacttttgcttctaaatgaacccatcttaaattgctaaacaagtactgtaacaacttggttagatgtatttttattgtaacacccaacttaagcttacatacaagaatttttaggatacattgataagcaaacacttaatccttttataaatattagtatagtctaggtgaataaaatatttccaacaaaaactgtataatagtaatcccgtcctttccctattaagttgaaattgatttactttttttaaaattgcgaggaactttaggcatgcttcgtccttttcacaggcggctgttttgaagtgctgtaatattctgactccgattctgactctgaagaagtttcagaagtttccgaatccaaactttgacgtttcgcagcttcatcttcgacatttttgggttctgaattgctatcggccaacatagctaccatacaggtaattcgattgccttctggaatgttatgctcaattactaagttccaatctttatcccatatacatactgaaccatccgagcttgcagtaattaaataatcatcaacagggtagacagatttgacgctaacttgattagaaaattttgaatttttaatttgttgagtatagaatataaaaagacacttaccgtttcttatgcgccgtaaattcatgtaaaatcttcccatcagaagtatccaaaaccagtactgttccattatctcgtccaactatcaatttggattgatagagacacaaagcgttcaattgagatttagaagagaagctgaaaagggaagtgagatcctaaaaatgtattagtaatttataaaagaaggaggaaaattgcatatagaaaaatgcataaattcttaccaatttaaaggcatcaatgcctcttcgtgacataataacaaatgacgactcattcaggaaaagaatagattctgggatagtgcttaaaggtaaaactttacctcctttacctcgtacaaggtcccagagccgcaactttccatcacctccaactgttagggccaatttttctgaagggtgaactgctataccagtgatgcccttatgagaagatgacttaagagtatgaaccaacaaccatgaacctttagaccacatactgatttgcccgttatcatgacatgctaaaaggtgatttttagtaaaacacatatctcggatacatgcattggcgatatctgtaggaacagaaacatcggctatttggacgttacgagtgtgatcgaaaattctgaaacgatgttagattatgcttaaaaggataattaaatacaaggaaggaagaatgaaaccatttaagtccagtttcataattccagttgcaaataacttacttaattgtttcatcactgctagtagaagccaagtaaataccgtcgacagctaacgcggttaaagctccttcatgagcttcaaaaagccacaagggcttgcattttttcctctcaatgtctgcatcaacaccgtaaatgaggtgagtatatgttccaactacaaaacggagcatcggtgactaaagtatgacaattgaagcctaaatccagttatacaaaacccaaagtaagttataataagcacccgatccttttgctttttctattataatttaattgagtcctaaaccacaaattctcaaataccaagtaagaaggagagagtagcaaagaatttgcaggtgtaatgaaattttaaagtaacagcaagaagtttcactttatgtttttcttcaaaaccaatgaagaaagatttttaaattgctgaaattgattatagagaatgaatattaataataaataccttattttgtgtgcttttggtctcaaattgatcagattgctaatgtaaacaactagtgtttcaaagtagcaagctcaaggaagaaaaagacatacagtagcttttacttaaacaaagaaccttccaagcactaaatcttttcttgtttcaattttcaccctgcatgttactggtatggtttcatcaaatattattgtagcgaggtttcagggattagcagctccattacaaatgttcagacatgatctatatccccttctttataagattatatatctgaacagtttcacatagatttattataaagcaatagaaactgaggtcgagctttcgaaatcgaataattgtttatagatttattttttttatcttgaatatttccaaattttatttcaacatttatcaaaatctgttcacaagcgtattttccaggtcatacgtccgattgcagagaaagagtaaagcagctgacagccccaaggcagagcggaccaacaaacattctcacgttcttccatgcaatatgtcgtaacttagaagaagttcgtaaatcgtttactaaattgaatttatttactttttacaagaaaaacgagttgctctgttgtatcgataaataaaatagagaaattcacaggtactcataatataaaatttcgttactgtagtgtttgtataatgatgtattgtgatagatttttgtcacataagattttggtgtgatgtgccttattccattcgtttctttatcaacgtacaatcgcgctatcttcatataataaatcggcaaattccagtaataaaaaataaggatttgtgctagtaatcactattgtactttatttgaagcctatttctgccatgagtccttttggggcagtataggtaggtaaaaaaagtcaaagtcccatcatgctctttgacaaactcgtacactttaagggttgttaggaatatatataataaatgtttctaattcccttcctcttaagttttacgttctacagtttacatttctatcctacgaagaaagcaattaattatgattgacatcggtagggacgacgatataattatgaagctgcaccgatttttattaccaaggttcttcaaattttttaaatagcctctaatatattattgaagagcttcattctttcaatactttgttaagtcttttgatgctttcctcttcaaatcgaaaaattcagcgcacgtcgttaacgaattttaatgtcttcattaaaatgcacaaatatacgtaaaaatagtttaatgtcttcggtatctatcgttgtagcggtttatgtgttgctgccaatatccttatatagagtaaacagtcttcctaccatgcgtgtctgagtcgtccactaattcaaacaattactcatgtttctagggcgattgctattcattgagtagtttgaagaaattcattctttccaaatttactttgttgctccatgtttacttattttcgccttttgctcgtttcgtctattttcgtatgctcatcatttttatgtcagttgttactttgtccacgatttatggttgaagtaagcttgcccggtcgattaacgataatttataaaatcaaaagaatcagtagttcaaaccaatttgctcaagagcgctactgttcttggatcgccacctttcgctacttctttcttcttatatccgatgtaagaatcttcttgtgggtaaaaaccaactttcaaagcaaagagaaacacataattgcctgtcaaaaacgaattttattaataaacagtaattcactactaattttgttttgccaaatttttcgttttccatcttactttctcattccctccaaacttcttgtttaatcaattcttcatacactcttatcatcgattgtataacgtcttcgaacgcactacgctaatgaatttttcctatatactgaacacgtcagtttacttccatcgtccgcaagtcatcgttttcaacgcgaatggtctattctttcgtttcttgtgataattgactgttcaatcggccttagctttataccgaaattttataaatctatttattcagcttaagatttcatcgttcaagtcgatattctctttgataccctcttttgtctttgtttgttcctttttcacacttgctgaggccattcctcacgatatttaggagttacgctttacctaacaaaccattttttgtctaccattttgacactcattttctttgttcatttctttcgcaactcacttccttggcgaaactggtggttttcgcctgttctactctagctagctaagctccctctccctgtgcattcttagcctacctctttttaccgatacaacgaatagcgctccgtatatatcagtttgccagcttgcggatcgcctcggaattcaagtattagatattaccaactaactttgtttgttaagtgagaattacgttcttatcattcattacggtagaatcgggatttttataagcaggcctttttttttccttaattaacgaggatctaccactgatcactttcatacttcctcattccttgcgattttgacatttgaggaattaaaattccttttggggctgactgtttcgcggcgattttcatttgccgcctaactctttcgcttctgacggaccagtcttcttttttttccttttcttaattttgttggtttttcgttcacttctcgaaccacaaccttccttaataagacgctttttttatccgtaaacattcgttttcccgtttacttctttctttcttctttttttttggggtttccttctacttatcttttggatcgtttcctgatatctttaaaggcaaccgtttttatcagttggggtctacgtatttaatttggattacgaatcttgtgcctcgtttcgccttagccagtctttctttgctagcgacttcttttttcgttcgatctcattgtttctttttatattctttattttttgttaacccactgctcctttaacttttaatacttcttttctcactacccttttcgtgtcatggatgaggagtttgaaaatgactttccttacaaggtgatgcttaatcagcaacaggatccttctgatgcgcaatcgagtcctacatttgttccttctgcaaacccttccctcaccactccttggttacaaaccactccctctgctaatcgccccacatggctaccgttacagcagcacatgcatcagcttcgacacactggtcttttacccgccgttgaatcgtcctttgttcatggccatcgtcgaagtgctagtgctggcgttggtatgggcaatttttccaaccaagccactattccttctaattctccagccgtttctaatatgcaaccaccgactcaaggcggtcaacccttataccctactaatttcttcaccacttcggtctctgcctcttcagattccttccctaacagtccgaccgttccttcaaagtttagcttaaatccatcagttgctacatctacgaacattagtccaaggcggcatgcaaaaagccatagtgttgcttctgtttcctctcccaattcccataacgccgtaccgtttactccccatgcgttcgttcctccagtcaacaacgcatctcctttaccagccttgaacactttaccacaattattgcgccctcgtaatttggatgctcaatggcgtccttcatcactttctcaaacgaatagtcctactcatgccgcgaatccatcttttcctgggactattgtaactcataatacctcaaactttcgtcctgaaggcggtggtcatcgtcatcgtcgatcgactggcagcttaagtgttggctcctctggctctggtttttcttcgggaggttcaggtaatccccgtaaaaatcttttttctccttatttaccacagtcatcgattcctgctctactcgctgagcgtcgtttggtaacgggtattttaattgtaagtaagaaaaatagatcagacgcttttgttagtgtcgatggtttggatgcggaagtattcatatgtggttcgaaagatcgcaatcgtgcccttgagggtgatgtcgttgccatagagctgttagacgttgacgaggtatgggctggtaaacttgaaaaggaagagaatcgaaggcgtaaagacccaatttctactagaggctcttttgacaaccttcgaattgacgccgtaccgtttgaggttcctcagaggtctgctataaaagcaagagatgatgaacaagtggaagggcagaccctgttccttcttgaccaaaagcagcttggtgcggacgaaaagccaaagtatgctggtcatgtcgtagcagtcttgcagagggcgccaggccaggtattttctggtacgcttggcatacttcggccaagtagtgccgctaataaggagaggcagacctcgtcgggtaatcaaggctcttccaataactcgggaaatgacaagcccaaaatcgtatggtttaagccatctgataaacgtgtgcctttgattgcaattcctactgaacaagcacccacagactttttgggtaacgatcaagcatatgctcaacgattgtttttagcttctataaagcgttggcctgtaacttctctacatccttttggtatgttggttggtgaattaggatctatggactctatgtctgctcaagtatccgctttattacacgatacgggtgttcatagtgaaccatgggaaggatccgccgctacatccgccgtaactgcactcaatgctttatcggataattttttaaacgttgctggttgtgcagattatcgatctgaagatgtctttttatttgttaaaaatgacgttagcaaagcagccgtttcagaagtcaagcaacatgaatcaaacatcaattctagttctgctactgatttcgtttcttctgcctttcatattcgaccaacttcaactggttatcatgtaggaatccatgttactgacgtttctcgtgttattgagccaggatccccattagatcgcgaattacagcgaagaagtattgcggtgaatctttgccaaaagtcggttcctttgtttcccactacgttaggtgaggctttatctttacgagaagataaggattgttatacaatgtctctcttactggatgtttcctcaactggtaaaattcgtggcacttggattggatgggctgtcattcgtcctcgcaaggcatataccatgaaggaagctgatgagttgcttcaaactgatgctagacttcgtttattccataccgtaagcagtcgcttacgaactcatcatcttggtacagacgtgccactcagccggtattgtaggttagtacgtcgatgggatgaagaaagctgcagctttgatcccaatgaaacgaatctttttatttcctcggcggttgaagttttacgtgaaactcttttggatgccgctaatagagccgttgcaagccacttgcgtcaggaattccgtgaaaatgcattccttaggactcagcgattgccctctcgagaaaactgtcgcatattacaaagtatggccattcagatgggatgtgttttagatttgtcttcgacaaaatcacttttacgctctttaagtttgatcgaagacgatactgttcgtaacattttgcagctttattattataaggttaccccaagagcagtttatgaaatgcagaagtataaaggcaatctcgcttcccagatgatgagtcttggtattgaggacgaaagtgacgatttgacacattttacagcacctttggaacgttatggtgatattgtagttcattatcaactgcagttgcttttgagaggagaactggcttctgaaaagcgccttcgtgtatggtcgcaagcggcaaacgatgcaagccgtcgtctggttataagcaaatttgcgcaagaaactagcattcatataaaaatatttagtgactgggcggagagtcaggtttggcaagacggtctcgtatgttttgttgctccatcatattttgacgtatttttcccatctctaggcatggagaaacgtgttcatttagatttgctcaatctaacccacgtaaggtttgaagaggaccagggcattttatctttatacgacgagagcggagccgttacagttgttaaattgttgacctctgtcaaagttaagctctttgtgcagctttcgactccacctcttatcaacgtttcaaatgtcgagttttgatgttgaacttcgattgtttgcaatgtttatttcatgtatgtgttttttggtgacacatgttcattttcggatgcctggaatggctttatattctcattcatattattgctcttattattaggcattgttgataaaaaatatgttacgattctaaaactgcattttttcccattcttacttttctctttaatttcgacgaagctgttacttacgtctaatatttgtttctggagatttacaagttttgcatagccaaggagctcgaaaactcggtttaatcttatacactaagatgccgattttttatgttatataactaaaaggatgattaaacttgattacgatagttcacgatgatagagttggatgaaggaatccagtagtctcgatacgtgattttatgagtgcatgagttgatgataccttgaacttttccttttttatacattagattggattttgtttcaaaaatgaaatcctgcttttatattgatacatgtcactttgttggcttaccagtagatgaagtgtcgtttgcgtttgcaatcactgcggcgattaggcaatcagaagtggattcttatcggtcgtttggggttagctgagtcttttattttttgtttctttttttaaaatgaatctactattggacgacatcttagcaattttcagttgattttttgcaatttaagttcatttcttacacaaaatattcaaatttatagttatgaaacgtatccgggatgtgttagttactcatgtcctattttatgatatgaaaacggcataagatattaaaaagaaaaggattctacaaatattcttagtgattactatttttcatttttaacgctgccttgttatatcggcttttgtttaccaagtgtattaactcgatatcgagtatattttgatgtatacgcatgctatactgattataaaaaattattaatccacaaagtcttagaaattatgagaactaaatgaaatactctttaaaaatagaaaaaaagttaaaaatatttatgtttcaagttaaacaacaatgtaaggttctagtggtaaagtaagtatgtttattattaggtcgcgacgcgagagtacttcgtattttgacaacaacacactaaaagtcagaaatcagaaggctataattttttatagcactagagattttgggttattttatattagaaccttatagtttaagggtataattgcttttttccagtcctttaaattgtttcggtcgataggattgattcatggagaaaacatatgggaaaactgtattgccattgagcagagtaaagaggataataaagcaagatgaagacgtacactactgttctaatgcatctgctttgttaatttcagtagctactgtatgtgtgttgttgataaatcagctatctgggcgacttagcaccattttgattgcataaaagaaaaagaaaaataaaagcttacctattttatgatttaggaattatttgttgaaaagttagcaacagaggcttatcaacttgccaaattacaaaaacgtaaaggaatacgatacagggacgttgaggacgttgtacgtaaggacgatcaatttgaatttttatcagatttgttttctatataattaaaaagtgtgagaactggaaaacggaagcttaagtgtttcctttcttgttcagaaacttcctcatgaaatgaaaggaaacaatcatcttgtcagtaaaatgtgatttaatgaattttatttgagttttcttcttcgttttcatgctcttgtgtctttttatccacaatgcgcattttcaaacagctttatcaaacaactactgtagctatttggataaaatagaacacatgttctcttaaattgggttacctgatttttcatgtttcaatcatgactaatttgcggcctttgttagctacatctataaacaatcttaatgattaggaaatggttaaacgtttgaactcgattgaaagatattgaaaagctaccagcgcccatctgtatattcttcatttaattcctttctcaatatcatttggttcatttatttaaacaaaaatgcagagaaggtcgagcttctttatctaatcccagcgatgcagacgtattgcttgcttcatggttatattctatacctccgctaccttgccgtgataatgccgtaatcgtacattactatactcgaaaactgatttaagatttgttctgttctaaatttccgactaccgaatgaattacgacactccaccttgtttcgttaatactactccattactaacaattgcgcaaatactgaaagcaaaccagaaccaagtagaaaaaatgtcggtttactcattttcagacgttagtttagttgcaaaggcacttggtgcattcgttaaagagaaaagtgaagcttctattaaaaggcatggcgtgttcactttagctcttagtggaggaagtttaccaaaggttttggctgaaggattggctcaacagagaggtatcgagttttccaaatggtaagttaacagatattatatacttttgagttgtatggattcactgtggttttgtttagctttggttgacgtgaaacactctgtcttaaggcaatttatgattaacagctctatttagggaagttttctttgctgatgaaagaattgttcctttagatgatgaaaactcaaattatgcgctctgtaaaaagttgatttttgacaagtttgaaggatttgaccctaaaaaaattcataccatcaatcctgagcttttgaaagaaaatcctattgaccctcagaatgttgctgatgaatatgaaaaacaattagtgcatgtgtttgcaaatagctccactgttaaggtccctgtgtttgatttactgctgttaggatgcggtcctgatggccatacatgttctctattccccgatcacgaggtactccaggaagacgttgcttgggtggccccagtcactgattcgcccaaaccccctaaagaccgcatcactttgactttaccggttgtcacacatgctcaagccattgcctttgttaccacaggtgctggtaagaaggatattttgcctattgtcattgaggattttacatctaaacttccaagtgcgctgatcactcgaaacaatttgactcgtacaagctggtttgtggatgatgaagcatcagccaatcttgagagatcctctttgaaggttttccctcaataggcagttcaatttaagcaggtggcctttagaatgcttaattgctacatgcttcggattcattacttgtttctttaaggtctttcaagggaaaggttgcagttctcttttgttgttcgtgagattctttgcataaacgctttagataatgactttcaaaatgctttcagtcacttccgtggaatgcttgatgaccagttttaacacatgttagtagattaggagagaacttgttcctcaaatcctctttgcatttgttgtctgttttttattttagactagcgtataaaggttagtcttgtaaacaatgtgtaagaagctaatgctttattaaattgttttattgcttcgtttagaatcatgtttagttgattgatatcactggccaaacccacactgcagaaatatgatgttttaatgaagaaatgaatcattgaaatatataaacttaagctatcttgtatcattttttgttggtgataatgttctaaaatgtgtttcatcaacaagataaagtaaaccaattgtttttgaattgcagtgatatagtttagcttcaattcttttattaaatcattaattcatttttaaaattatgcaaaattacggcattttctcatactgcttatgatagattttaagcaaagatggaaatttatatccaaaaacatgcaattgcttaaactctcctttatgtaagggtttattaatacttatgtgttttctacagatggcaaccttctgattaattatcattaggttaatttgtgatagaagctgtagtgatcttaattacaatagtttacattatagcaagatgttcgacatgactcaatagactaaaaattttttttcttagcatattcttcaaaactgtaggtcttaaaaacagttttgttagcttaacatcaccttaagtcgttagtcatcgtagaggaggcacttgatatttccatcgcacaacatgaactaccaaaggcttgaaaagttaggtaagtatgagtttgaggtcccaaaatttgcaatttcattaacttaagtaggagagggaacatatgcgcatgtttataaggggcaaaatcgagtgactggtgaaattgtcgctctcaaagttattcgtattgatgcagatgaaggaacacctagtactgctatccgtgagattagtcttatgaaggagcttaggcatcccaatattatgtctctctcagacgttttgcaaaccgaaaataagcttatgctcgtttttgaatatatggaaaaagatttgaaaaagtacatggacacttatgggaaccaaggagctcttccaccttctcaagtaaaaaattttactcaacaattactcaaagggatatctttttgtcacgaaaaccgagttctacatcgtgatctgaaacctcaaaatttgcttatcaacagtcgtggtgaattgaaattggcggattttgggttagcccgttcaattggaattccagtgaatactttttcaaacgaagtggtcaccttatggtatcgtgctcctgacgttcttttgggttctcgagtatattcaacttccattgatatttggtcagttggttgtatcatggcagaaatggctacaggacgtcctctatttgctgggtcaaataatgaggatcagctactaaaaatcttccgattattgggaactcctactgaacaatcatggcccggaatttctttacttcctgaatataagcctactttccctatttataaagcacaagatctcgcctacctatttccaacatttgatcctcttggtttggatttgttacgacggatgcttcgtctacaacctgaattaaggacgaccggccaggatgcgcttcaacatgcttggtttttaaccgcataggctgtaaattaacatcaaaaagtttaaccaaattacgattttatttattcatttcagtttcctattgaaatcattaattttttttttggaaagaatgcatttcacctagggaaagagcacaatatttttggacgttcaaatttcttcgcaactgttttagcccaagtagctatccctattgatcttttttaaacgaggtttagaggtaaatatttggttattattttgagaggatttgaagctgtcgaatatatttttagccaagaattaaacggcgttttattttctacgattaaaatatcgtcgctgatgacattcaagtcgtaaatgaaatacttaaagaattgaatgatccgcattgcgtctgacatttttatgaaggagcaaaaggataatattcaaaaagcaatgcgggtttttagtatactgataataatttgcggatttcaagcaattatccgcaatgcacatgaaaaacaatcttttttcacttatttttattagtggattaatggcttccttccctattatttaactgcatgaagggattctctattaatgttctctttaaccattcgacattttatgtggtttctgtcgttcattattctttttatttactttcatctatactccatcttttcagttttgaggcatcaatggtaggaggtgactaaatttctttgagtttcgtttaggaagaaggttcaatttgtaaacatgaaataataattgtgtcttttacaatttcttttgagtttttctactcgcttggcccagcaatctattgtttaaggagatatacggatttggcttatcgtatttttacgacatcttctacctcgccaaatcttttagttttacccatactgctagaatttacattacatgaaaaaatgactgatacgcgaaaattcaaagctactgatttattttcatttaacaatataaatttagatcctctaacggagaccgtaagttaccatctaccgtacttaaagcggactttcattaactcgaacaacttttagttcaatatttcattttatctcagttatttgaacaaatggcctagcttgtgtgttgtacaagagtctgacctatctgatccaacccttatgggttatattatggggaaatcagaaggaaccggtaaagagtggcatactcatgttaccgccattacagtagcgccaaattcccgtcgtttaggccttgctagaacgatgatggactacttagaaactgtaggaaattctgaaaacgctttttttgttgacctgtttgtgcgtgccagcaatgcacttgcaattgacttttacaaaggattggggtattcggtttatagacgagttattgggtactatagtaatccacatggaaaggatgaggattcatttgatatgcggaaaccactttcgcgagatgttaatagagaaagcattcgagagaatggggaaaatttcaaatgcagcccagctgatgtttcattttagttcactctctttttacaaatctattaactagtgcaaaggaagaagatttttttttatattaggtaaatggtatagtatgtacatcatattaatgaaaatcaaagttcagaaacgactaatatttgctatgctttaagacctcggtccttttccttgcttacatattgatattgtaagtatttgaagtttttgattaatgattatgcaactctttggaacattttgataatttatcaataaaataatgtatcactacacaatggttgaaatttgcgttcagtttcctttagataaatagcaaatcgtctactagttactttatttctctaatgtgaaatggcaaactaaataacttctatttatgttagcaataaatcaatgaatgactatactacccacttccattcagtcctctatacttgcaaaatgaaagacaaaactatgtaaatacatgtaaaacatatctttaccaaaaatcgtagctacacgatcatctgacttaacaactttgcaaaaacaattcaccacagaaatattttttttaaacaagtagtaagtaattgccagcaataacttttaacgtgaattatttttttaaaagtaaaactatctgaaaaaaaatttacatcatgagcttacaatatcaaaagttaaataaagaaataagaaaatattcgaagattaaaaagacgccagttcaacgaaaagagaagaggccttttatttcaaccttctactatatcggttgattgaaaattgaccagagaattgaatgtatctaacagatcagagtgtttcaacctttgtccaacaacggactttatactgataaatttcacttcatggttttattcaaccaagttcttatacaaaaagcacctctacaattaaatcagaaatcacacgcaactttacagaaaattgagaaggtcacaaatgagttattttatatcaaattacgattgatttactcttgggggatctcaatttcgccattgtcgatctccttttgaacgtcgtgagggttcttgccgtcaacggtgcaaccaacagagaaggcagtaccgagaatctccttaacggtaccagaaagctccttagcaagagacttgaagcgcatagtacgggcgacctcaatgatttcgtcaagagagacattgccagagtgagcgacgttcttgtccttctttctgtcacgagcaggctccttcaaagccttaatgaccaaagcagaggcagagggaacaaccgagacagcggcttgacggttttgaatagtcaacttgacggtcacacggagacccttccaatctttggtagccttggcaatatcttcaccaaccttcttgggggacaaacccaagggaccaatcttgggagcaagggtggagccaccggcgacttcaccaccgacggctctcataaagatggtctttacttcattgggatcgaatttaggaggcatcttgggttgtggctgtgggatcaagcaagagtgattctgtgtgtccaaagggaagaccaaacaacagtcacaaccctaccctaaagatttaaggagatggtagttaattctcaaaatttaaatagactaagtaaacatgaaatttagagctcaatttatgttcaattgactactttgatcttcgggtaacatttaaaaaatcaaatatttggaagatatttgaaacgcaagttttatgtttccactacatatgtaaataagtcgtaaattgtacgcagcctcaaacccaaaatcgtaagtcgtagacacagttgattctgaggaggtcattttgtccccttgagacattggagataacccaagcacggcctcataatatttaacggcatagtgctctaatccaataaaatgatatgcttttcctaaattataaagtgcctcttgcttctctcctaaaccttcgttaacccgaagatcgtaatacctgtataagaatgtaaatccctgaagaatttgataatgtctattatctgacagtctctgcattgcccgatgaaggtaagccaaaccaagtgaaagattggtaattggacaatcaggattaattgcgaaagcacgactatagtaattaattgcaggaatccaacttctattgcgagccataatatgaccataaagtaagactagcacaggatcataggatgtgggaacggtagccaatccatcgtcgttctttaccagtgtagcggctccagacactaagctgttgctcattaactggtccattagcttaataagtctaagtagaaatttttgatttgcgctatcaacaaaagctcgcgagcattcatatccttgacttaaaacagctgaaaaaagtcggtaagtgtcttgccgaaattgaaaagttgtgaaaacccaacgcaaaggagttaatgccccttggggatcccgtgcatacatggagcatgccagcatgcaccaacgtaaattctggcgttttatggtatcttgatcaaacaggattgcccccatcgctgttgtcagtacatcataagcttgttggacagaaccaacctttgtaagtctgagagaaaattcaacgaataattgataccacgcgtcgatagagacgttgcgaaaatagcccgttctcagtattgtatcaagatcgagatcaccatatttggttctagtaagagaatcgtttagccgattaatcatgctagttaattgatcatttaagctcgcataccgagtacgtcgagtcagcaatcctgctctagctctagcttttttctccgatggaaagaaagctttaatactcacaaactcatcgatcaattcagaagcaattgccagccattcattcaaactttcacttacattttcttcctttttgagtgattgtcgcagtatatctaacttatgaaaccgtctctgagtctcttctgtcttccaaattgtaaactgcctagcctcttctttagacctacttatccttgctcttttttcccatttgtcttgaggtactttttgatttccaacgaaaagttgcgaaccgacgttcttttcatggtcctcattttggctttgctctctttctaactcattgatgtttcgtctttgttcaaatatattcgtaactatttccagtgctgcatcgcggttatcctgtaattcattaatctctgccagctttatcaaagcattggtattgctattgtcaacgattaaaattgcctccatacattgttgagcatgttcatattccttaagttccaagtagcagacacccatgttgtaccacaatccaatgttttgagccggctcatggttgcatattaatacaaagtactccaaagctaaatctaaacgttcaatatccatataagctttcgcaatatcgtaaagcattccccaagcataatcaggaggtaaatttttaatgactgagaaatgcaactcggcctctggaagctccccagtttttaatcttgcaattccaagttttgtgcgaaaaagatgaggaagtaaatatgcctctttattagtatgctcttcagatgcgttaggaaattcgcgtctcctctcatccacatcccattcccggtcatcatcaaattcgtcccagaaagactcggacttacggccacgaaaccatcgtacaccgcgattaattaagcggataagatttgaccattggtggtctaacaataaaagttcagcatataagttaagagtcggtaaatcgaaaatgtcatttccaataggtggagcggggtattgataaaaatatttccaagcaatctcgaactgttttaatatttctcttggggcatgaattttaatgtagatctctgctaggtttttcaatatagacgcgttatatggcgaagattgaagtaggaatttaaagccttcagctgcctttttcaaggagccatgttccttatttagaacagatctattccaaatgtatttttttagttccgacttatttggaggtttcgcagagacggctctgttgtaacaataatctgcttgatcccaaaactctaagctttcgctgagtttcgcacaggtgaaccaaagttcatgatctttcggctttaaatgtgcagccgccatccaagcaattaagcacttttcaatatttactcttccattacccctttgacgatgacattcaccaagcattttccaagccgcaatgacattattatcaatacgaacaatctcttcagctaatttttgggcttcgtcgaagtttccttcttgcgcaaacaaatgattcgctaaactcaacatttgttgcacttccaccgagggaagcatatcagctcgactaacacgtcctcgacctttatgacctttacggacttttctaaatccagcaactgcctttaaattttcttcccattcctcgttcgcaatgtcgtcctcggttcttgaggctgttttactaaagtttgattcatcgtcactgccttcataatctgactcttcgtctgaccaaaggccctcagcttgaagggcagaggtatctcccaaaaattttgcatcaacttcagatacattcctagcctcatcgacaatttcgcttatatacccgtttagatcttgcatttcagcatcaaagttgtcagttgtatcattttgcgtttcattcatattggaatccacatagctatttccaccattttgaatcatcctttaagatgctcaatcatgctttcaaatcggtctgttccttttgcctacttgaagttggctgttttcgcgttggcgttggtgaaggcaaagttgaagtaagtcattatagaagtactcaataaacaaagaggtcatgggtaccacatatcttgttctacaattgactaattaatatgaagtcaataaatattagtccttttttcctgacaccagttattttacttgcaacatttttgaattgcaaacttgacaattttgatgttgtcaaaatacctaatatctgtaagaatttggaagatcctagtcaatcaaatagtgtttttcacttttttttttggaaaatggcatctcaaggcttttcatgttgattgacctttgtcagtgtacacagagtatagtatcgaaacctttcataagcaaactaataagctatattaaacaaacgcagatcaaccccatcttcgaattgttttgaaacgaaaatgaacgagttaacaaaacaaatttccatagttgaaacttttcgttgaaactgtatattaaataagatttttttggtatgtgaacttatttagtaattaattaagcacacatccaaaaaggaatgtgagaagagttttgtgagaaagcaatgttttcctgataccttgaatcccttaaactcttcatgctcagcaggcttattacaggtgtcgtaaattctagtttaactttgctcaactcgaaggaaaagcaaattcaatttatcaaaatttccaatatattataacgtggttgaaattctcagttgacctgccattactttcaaacgtatagaatcgggtttacaatgtataaaatatttactacacagatgatcaaacaataaaacaaagttcttcattattatagctaatgtgttcaatttcctctatgttgtattccctagatcaatgttcatttatttacacagttaacgacaccttggattgtgtaaagattttagcactgagcgtcgcaaattatgattgaactcgttaattcgcagtccatcatattgtgagttcttaccataggtttagttggaaatccccatgttgagttataatcgatttcgggggtatttgattcctcaaattcatgcgttaaagctgttcagatatgcctctaccgcatctacaagcggtgaaaaaattgaatcttccgagagaccctacgatgtagggatgcttctacgaccaaaaacgaagttcgaggtatgtaatattaacacgagggttactttttatttatcaagccttaattcattttttactaattcttatcaagattaaaacttacaaacctatatctcctggtcttcgtcatttaaaaagaccagttagtgattacctttggaaagggaaaccttttcgacctttgaccgttgcaaaaagaaaaaaaggtggaagaaatgaaacaggaagaattactgtaaggcatcagggtggtggacacaaacaacgtattcgtcttgttgactttgaaagaaaagtaccgggtgttcatcgagtgattagaattgagtatgaccctggtagaagtggtcacattgcccttgttgaaaaattgaattccgaaacagccaacaaaagttatattttggcttgtgacgggcttcgcgaaggcgatacagttgagagctttcgatcgcttttgaagactggttctaatggcgagccagtagaaatggaccccgtcctagctgctgaaattgaagatggaacttttgcagcaaaaaatttgaagccaggaaattgttttcctctcagattaattcctataggaactgtcattcatgccattggtgtaaatccaaatcaaaaggcaaagctatgtcgttctgctggcagtagcgctcgtatcatagcttttgatggtaaatatgctatcgttcgtctacaaagtggtgaagagagaaagattttggatacatcatttgctaccattggtgttgtaagcaatatttattggcaacatcgccagcttggtaaagccggtcgttcacgttggcttggcattcgtcctacggttcgaggtacagctatgaatccatgtgaccatccacatggtggtggtggtggtaaaagcattggtaataaaccttctcaatctccttggggtgttttggctaaaggtggatacaaaacaagaagaggtaaaaatgttaataaattactcgtccgcgatcgtcctcgtggaaaggaaaagcggtaatcattttattaatgatctctgtcttcatgacttttacatttctatgttttacattaccgtaatgcatttcaattttcatgatcccttctccattttaatagtcgatgctattacctatccatttgtggaccagatgcatttatgtatagttattttgtgtcgaccgtcatttatcgacgaaaaattttaagcattttttaagagtttagctcttacaatttaaatctgtattggtaatttttgttcatcacaacgttgcttaaagctaaggactatcccattcaaaattgtcgtttgcttacatctaccttaaaagggttatcgatatcattcaggtaccaaaagagtattctattaaacgcagaaaagaacggttttattttaatatggccaactaaataaaaaaattttatttataaaattgtagctaatttagcatattaattttttcttgccttcgtccagcgaaaagcgacttaaaagcggataaactgggtatttaatatttctctacaacacaattaacgcttggaaaccctggaacgacggtctctccttgatttgcgtggcttgcgtcgaacttggaatattctttccatcagtgtaaggtcagacactttaggacctagtcgttcatctaatggcgaacccctttcatcttgatttctactgtgcgaaagtgttagtaatttgaatataaaattgagtaaaaggagattctcaaaagtagaggaaatgatttttgaaaagtatgagtgcacccggactaatttggttttcacaagttataccttttagatttgctcttctgagccttttcttctcgaggatcaccgtgaaacagataatatctcgagtaaagatgtgcgcttttaaccttcttgtctccgtagcgggcgtaacgtattttgaattgacacgtcggtacagttgggtgtggtttcgtttgatattccaattcctctgaaaattctgtcggagactccataattaaatgaaataaagcatttcgtgaaacatcatcatccgcataaacaacgttgcctatacgcggttatagagttagactaaccctttgccagttttcgcttcttacattcgttatcattaatccattcaattgtacattgagattcaggagcataagctgaaataaatcctttgacttgttcttctgaaagattatcgacgccagctagatgtaaagctgttttacgcaatgtagtatcagccaccacttccgtttctaatggagtactagtggcgtcgggtatcaatgattcttcttcaatctgagtctctgcaacgatatccatttaaatctacttctctacaactgcttcgcagacatgcagtttccaaaagagtgaatgtgccgtccaaagaaaattacgacgcgctataatttgctatacgagaataacgagagatgaaagatccctataggcaatgtaatcggtacagtctcctataatgagtgaagatcggaagtcaaatgtaatttgtatttaaaattaagaaggaaaatggagattaaatcggctttttgcatgtaaggctcgtttgtgtaagaatctacagtacgctaaagcacattgaattgcgtattgttatttacagaaatttatgggatattacagtaaaacctaataagatttacctctgggacaccgtatgttcgagaatgagacatgtaaacatagcttccgcacatttgcaattttcagtacgaaacattaattcttgcgcttttcaaagatatatgagctttgtttaattagttttagctgattgcttaatcaaataaaagattgtctatcttaacaccattcgttttctaatcccggcatttgtctgtgaaatttttaaaaattaattggaattactctacaagcaacttattcaaagaaggaataaatagataataatcattactagacagaagactaatcgcatggaacgtttagctactcgatcgagccatgatgatccatattcgaggtcttcccttccaacttcgaatgccattaatagcaaccatgagtcaaatggttctactttttcttacgtacagagtttacgccgtgcaaaggcgactgtctggagtgatataggccgtgtggctcctttacactctagcccatcaatcaaaagttcatcacaaaatgggaagtcttccagcaaaggcttaggaggcatgcgctcaagggtattttctagccagcatcatggtgtttatcacacccgtcctgcttcgcttcattcacgtacaatggctcctcagcacaccattcttactccacgattatctgctaccgaaggtaaggatgacgatgaggacgaattggtaatttcgacatcgaatactgcaccaacatatatctcaatgattgagtcttcacgtgccagctcaacccatagtgggactgcaccttccattatgggaatgtcaatacattcaagagcagactccagagccgaaactactcaatcagacggctttgaatctcgtagcggatcacctactcatgatattcaatcttatcttgtcaatcgacgaagcagcagttctgaatcttcagacgaggacagtgctgaagaaggaatgaaacgtctagtaatcacaaatatgggggacaatgatgaattcgatagcgattagtgcagttatttttccatcgatatctgataaagtattattatttattatggtgctattccctcacctagtttaattgctttaattcgtttacttttattcgcattctttggcataatcaagcattccttcccctttctgttctattacgtatttctttcatttaaaacccggcattgtcagctagtctcacatctttaatcaaaacatgaaataaactatatcaatattatcatcattctatttttattcatttgaaagctattcggtgcttcctgttttaatgtaacatgaatatcaataacattttaattatagaacctataatggtttaggtagtgtggaaaattgggtaaatattttaaagtccgagattcatagattaaattgttcaaaaacaaatattttatgcccaacgaagactattctagcagaccaagaagcaatgaggtatcgttttccttcattatcttttcagccattaaactgccaacgttcttctcaagaagaccactagcatttggcggaagagttcgttgatttggtaattgatcatcccgcagtaatagcaaagcgtcgtacaaagcatccatacatttattggcctcgtaaatctcctcttcatttcctttttccaaggttttccgaactaggacttcgtaaactttgatattgggaacgacgaggactctaatagcttctttccccatagtttttaagcctttgatggcaccataatgagtggaatatggcttggtgttatccaaaaatgctttgagtgccgtgcgagtaacgcgaggctttaatgtataatacacattaccaaatcgatcacaaacaatcccgagtaaaaaagcagctaagtctcttagtgcataatgctcgtgattattaggatcactgccaaggcgcttcgcgaccaaacaagtaaggatggatggcatgagttgttggacgtaaggctctacaaaaaggttggggttatcaagaagggcccaggccatgtgcattaaagtagtaagaaccacaagatttcctaagtttcgagttacagaatccgataaaaacattatgaagtatggtaaaagttggtgtaatccggggtcgtcacgtaaactcgatagggcagcatcacggagctcaacattagtttcatcaagcaatgcactggtaatacgctcaaaataaagctgtaactctttggatagcacatgtcgcaccaacggttttatctcaacgttgtccatcgaagtgacaccgtttcgagcttctttagcagcagttgaagcacctggcataacccctgaagtacccttggatgcccattctccaactgtgtgatctgagggagttggattttgaggaatggctggctgcacaccttcgatggccagccagtgtgcactgtaagaaatgtttctagggactttagggagaggagcgtttatgattttttcaaaatccacttcctcatcatcaaggtagtaaagggaattttggcctgcacctacagcggcttcatgaaattctaatggacgagaattattgaagccgtataacggctcaacattcaacgtccgtaacgctgaagagatatctgcgctagttaaaacagttcttttagaatgaaccataaacttagtggcttcctaaatcaaatactgttagagaattatgtttaatgtcagaataaagcagactatctagcaaattgaaaggcatcgtaaaaaactagcaacaattttttagttattttagcctcttccaaagaaagtaaaatctcatagtctactttcacgaaacctacctgaaccacctgatgaattctatattcgagatccattgcaatagctgctgctggttcatcggcaagattgccaatcccaagcatttcagcaacatctttgatggattcaatattccatactgtcaaggacatgacttggtagtaagatgaacgatttatggatcaatgagtgaattgcatctgcagagaagtagttaacgatgttagaagcaactgctttatttaacatacttgtcagcaatactacactacgctataatacactacgttgcgtatcactatatgtcacatgttctaattatatatcgtaccatgtatgatacgatatggagattgatcttaatgataatctattaagatctatattatctgaatactataaatagagctactgctgaacctcgttcctcagttcagttatgagctatattagtgataggtaacattataacccagttaatacaatacctatactcagttgctacttatacaacctgtgtattgtaatataatagatcacaaggaaaactcaccgcagttctacgtatccttaaatcagataccaaactgcgtagcttacaagacagtgagctacactaaaatcgctattaaacattacgttacgcatcaaaatacactacatggaataccaattaatctcaatttgttgaacaatagcagaagactatatgtttgtttactaaaacatccattgatattgatataaaatagtagttaaaattagaagtctagattgaacagagcatcattctcagtccagttattagctgttacaatgataaatatattatcacccaccactcacaatactgtataacgcaatatactgcttctacaagctaaatataatttaatgtagccttaaaaggaattagaaacttgaattgttgacacttatctagttgcaccgcaagtcaccccgcattgctaaacgtatttaaccatcgttatttttcgctagtcgtcgttgggctgcgcatcaccatttcaggcacgatttcagtgatcagatccaaaaacccaaccggccaccatcatgcttgggcataatatatatgaagaagacgatgcatttaatccattcgcagattccgtttctccactgaaccctccaaaaaccgaccaagagccctcagctgaaggagtggaagaagagtcgccgaatgttcaagcttctccaccaaaaactcatatctatacatctcctaggaaacgaagcgtcaatttgaaatctcttccgtttgaaacgttaactttggattctgcacctttaggtcccttgcaattttctgatgcaccttctatggcacccgaaaacaaccgtttggaagttggtttaaatacaaaaattaatccgttaaaaggatctagtcccgctttgaatgcagatttttctgcaaataagccttggatctcagaagtgaactccttttccccttctcctatcggagcaacggaaaatcccactataccaaattcagaacagacggtagatactttagacgctgcctcatcttctgctccaaattttacacacactgtctcatctgcctcctcccagaagcaaggttcaacctcattaacagatacggagaatcagaaggcgcacccggcagcggcacctcaatctcttaccccgttttacatccaagttcatgaccctcataccgttaaggaaatcactaaatcgcataccgtatattcggtttccactcgtttagaggaacacaatcaaccttctgttagcaatgtgactgtacaaagacgatataatgattttgcttttctttatcaattgctttctaataatcatccgggttgtatcattcctcccatcccggaaaagcaggttgtaggccgttttgatgatgaatttattgaacagcgacgagcagccttggaggtaatgcttcgcaaaatatctgcccatccggttctacgtgatgattactcatttaagttgtttcttgaagcagagacatttgaccctagaatgacacatcgtactactctcattgagagttcatcaagtcctttgcgctcaggtccctcaacatctggtttacttgactcattcacctccgccttccatacctctggatcttctaaattttccgaacaggatccaattttaattgaagcaaaggatacacttgattcgttggaaactcaactaaagtcggtttatcacgcgcttcttttatccatagatcaacgcatacagttcgcttcagccatccatgattttggcgaggctgttggaaatttatctttagttgatttagagcccaccttatcatccaagtttgatggtctttcccaactccaggtagagcttcgatttgtacaagaacgtaaggttgctcaagacaatttgacactgggcactacattggaggagtacattcggtacgtggagagtgccaaaaatgcctttactacacgtcaaaagttgtggcagacatggcaatcttcagttcaagctgtttctcgtgctaaaactcaacttgagaaatgtaaaaagcaagcgaaatctcagcaaaaatcactcccttacttggaagaacaatacgaaaaatatcgagcaaaagctgctgatctggaaaaagagttttcggaatcaacaactctgttaaaacgagatttgagttctctcacaaccagtagagttgatgatctcaaagctagtgttgaaacgtggttggaatctgcaattgaatctcaaaaagaaattattgagcgttgggaatcatttttggatcaataacgactctaattttccctatgcactcttttaatttttatgtttttctttcgtgtaatatttctatcccatattcgtattaatgtatttccaactaccgctttattactttgcacttctctagctgacgatttctattctattctaattatttttttgcaatttcccttttcgtccatggtacttcattacttgaaaagaaaatgtaccttaaaatattgcattctatctactaaccttacagcaaccctacactcctttgtaaataaataacttgtgtatgtttttaaaaattgtctttgttactcaagcctttttatatttgtttatgtttaaacgctttttcctgcttaaattgtgttacttatatgtaaaagcgtatgcaaaaatttgtttaataatatggtgtatgactactttatgttacatatttatttgtcttaatttagactcgtgattcaaagctctcaaaacgatagctcaaaaaaatgttcatgtaggaaacgtttatcattttgtatcctaaggtttattcatattttttaaaaaaaaaagtggatttcgctttcattaataatctcgttatatcaatagctaatcacataatcaagtgcgaaatggaaaagcatttaatcaattcaatgccggatatctgactgttgaatcgcaatgtcttcagcctttttgaggaaaggtaaaagctttccatattcttcataagtttgggcggatggtttattcatgattagttcaattttcttggactcatcccaagatttgtttacatattcttcaaaggtaaatccttttccattcattgcatatgcagccttgatagcgccctaaattgatggtcagtaactattaattaacaacattttccgttcacttacgccaacagcacaggcattactaccgccgtgttttagccgataaacatcacatcccaaaacctggctaattttaaacacaatagcctcgttacgactagctcctcctacaacataaacacgatcaggttgtggtataccagttagcaaaggagtaatccgcatgcggatatcaagattttgactttcaactatggcagaagcatcctcatctggataatcccatgattcttcatctttatccacctgatacaactcggtgccttggattgcaaatctccacgtacccggtccaactgcgggtaaaatctccctttgtggataaaaaagaccgagctgtttcttttcaccagcacctttaatgttggggttcaaaatcgattcattaaagcggtcccaactggtattgtccgaaacattatatttttcattgattgtgtttcttacctgttcccgcgctaagctaccgtttttatagcataacattaccatataatgctaaagtccatgttagttagaaaaccagagaaaatgatgagttttgaacaactacttcaccaaaagaaagtcaagttcaacttacgttctgcgtaacaggatgagcaaacatgtgatactctggagaacacacatagttttgagtagccattagagcagtagtactagtacccaatgataatagtacatcttttcccggtcttaaaggaagggataaaatagtggcagggttatctccagttaaaggaatgatttgacagttaggagaaaacccatacttcttaacgaaatacttcccaattggtcctagatgttttgccccgttaatctcaaccgtacctagtttgttagccaagtcgggtcctttagaattaccagcaacttcttccaacaagcgaatatcgaatttctcattctgaatgtcccagagattcattccacaaacgtcactgatgtctaaaggtgcctcggtttgcagaagtaccgaggctagaaaattagagacaagtgcaattcgttcggtattttcgtatgtctcggggtgcaaacgacgaaaacgcttgatttggggtccagtaaagcgtaggtgagctttagacccagtaaggtccgctagtgctttggctccaccaatgcaagattcaagctcctcgcattctttggtagtactggcatcttgccaatttggagatgttggatgaatgagactttccaattgttgttttaaagaagatttggcatccaacgaattgagggcttttttacttcccttaagcaggaaaacgcttgcatgttgctgaccggcaccagatatagcttgtattttgctaacatccacagaagccttaagtctctcaaacagtaaatcgatggcgtctagccacatacatactggagcaaaaacctcatatccattcctgtagacccctttgatagtgttgtaatcacttagatcccgatcaaaatcgacggcaacctcttgatgcacgttcaaagactcatcaatgaccacgcccttgagctgctgagttgagagatccaaacctaaaaacatattcacaaaagtcaaatctttaaaatgactgtcgatatattgtacttaagaaacggaaagaatgaatttcgacaaaatcaaattaacagaaaaatctcgttttagcgccttccttaagctgtattttccgcagttatatgtctgatcaatatatatatcgttaaccattgacatccaaaagttctagccgtgacttatgtccgtttttacttacgattatgttcgtaaaaataccttagatacagtttaccgaaaccttttcaaacgttagcttaaaaaaactcagagtgttgttggggtaaggtaccttgtttactctagagaaaaacaacgcgttggaaacacgtttggcaaaaaactctttgaaaaaaagtgatattcgtttcaaaatcgaatatcaatataaaaaaatggctgaaaagtttgatactgacaaggaataaagctaaaaactcttgtttcagcaacaattgactgaactctgggagaacacgaaaagaaggagaaatgaagtcgtttacttaaaaaatcgttaaaaagttattacttcaataaatttaatattttcttgtttgttaattgtactcagaactgagcaatggtatgtaataaagcaagaaataatacaaatcctatatggttgtggttaggcttcgttatcacaaagatcctgaaatatcattttaagatatgcgtaatgtgcgtccttaatttaagcttagagaaacgaaccacttactttcgttttgttaagcttatttttttcaatgagtaacatgttttttagctaaaacaaaatgctacatctcaaaagtatgaggccgaaaatatctttaatgaaaaaaccagcatattttttaaaatgaagctgtctaaacatgaacagtttataccgaaataaattccttttcttttgaagttagagaccctcaaatgtccgaaaatagttgtaagctggtaaatcgctcttattatttacttttccaaaccttcaataagccatttctcgagtatggcacgaaatcgctacataaactttttcgttaattgatcaattgattaaacaaattccaagagtttttggagcgaagaattagttttcttttagcaaaacattgtcagttatggtgtcgtaaagatagcgtaatctttacttctgagtctatttttacaaaatcaatatagctaagccaggggtggctagacgtttagctgtacggtttttttttctgcgtattgttgagcgaattctatagtatttgttttgtcgtcaagggcatttgtatatgcatacataatgccctcaacagttgcttataagaggcttactcctttgttcttttccaatttctttaaaacaaaaaacttaagtacataaattagccttctttggatctcttacctctgcagattgagaaaggtaggtgagaatgctgcacgctcaattcacaaatttgcgactgttatttaaacagaccttcttttttagtttgattttagtcgcttttatagttgcctatgtatttcatcttaatttcattctaacaaattagatattgcacaatggaggaaactttgcccagttatgaagccgcaagtggtgcagcaaacctacaagaggtaaaaccacaagttcttcccttggaagagattaaaaaaatttataaaattagttactggtggttatgcagcattgcgctcatccaaacttggtgggtactgcttggtttacttccaatattctttgcgttggaacattatgaagttccctacaagtggatttttattatcgagatgctatactacgaactgtatctcactctttatgtttgctggtgctgtatgttttccctttgcgtaaaactattaaataaattgctaaccatctaatcgtctagataaactcagatctgatttttggaacgaagcggcaaaaaatcgccccaacgagggtaactaagcctaacattttttgtactaatccatttttagaaaggttatctgcccttggtggatgggatttcttacgcattccgaagaaaagggtgttagtgttacgagatgcccagtctgagaagaaacaaaacaacgctgatgcttcaaatctcgtctagaaatattcgtaataagcgcaaatttaaatttttactttcataaaagttatatgttatattatacattactgtttccggcatatcttttacaattgacgaagtgctattaatgcaatacttgcaacaagcatatttaattacgatggaatacattcctttccttttaattgagagttttcttttcacaaaagttaaagtttactgtctcgtattctaattcaagaaaaataaaaaagataaattaaatacagagaattctgttaatttgctttcacacatgctaagattcaaagttggttgggtataaacctcaaaagtcttatgcatgcatacatgtcaacatagtaaaaataatttctaatgtaaattaacgaatatggcaacactcgtcacccaagccgtctgctattatgagtactaatagtattttattccaccattaacaaattattttttaaagaaaaaaagtgtataaaaaaagaccataaaacttaaaaacatcaaaacaccccatattaatacatttaaccagttccggtaatctttttaccaagccaagtacttctaagcttcatgactcggaatacgtaaaacaacaaaagcaccgcaaagatattgaagaacacataaccaacaaagatacccaaatttctccagcgatgagtataacgcatactaaaccgctccaaaaactggtcagcggtttgatatggacagtaactgcatgaggttgtagcattaggatttaagaggtttccagcagctgtgttattagttaagaaagcactcatatattcaccgcatgtttgaccgctaggagggttgatagtaagcatctcatgagacttgcattcaactggaagtccatgcaccaaatcagaaagtaatccttcgatcaaataggtaaacggagtcaacgaatgcatccaatgccaaaatccgaccaaattactattaggctgcagaacaccgttaaatgtaatcacgaatgtgaataacaaactgttgacaacggacgctgtttgagcattagggcacgcactggcgacagcttggccaaaagttgagaagtacatttggaagaacatataaagcaaccaagcgtaaccagttttgtcaccaggatgatgaatatgcttataaaacttgattggataaaaccaacaaaggaagaaaagcgtgccaaacaccaggttaaatggaatttctactataatggctgaaaatacgaatgcaacccaactgtaaatattcgaaggcttttctctaacttcaaagacgttacgcaactcaataaattttggttgaagaccattaatcaaaggaactgcaagaacggttgccataaacacagcgaaaagcttgttctgaatattctgtacaccgagaccttgattataaaatgtaaatccaataaataaaccagcgaaaatatccagtgctaatttagacatcaatatagagggctctctccaataagactggaaatttctggtcatgaccattttgacttggaaccacagaggcatggcgtaagtgctcctatcttcctttgacaaagtctttttatcctcactgtttgagaatgaagcgttaattttgtctagctctgcactaatggctttacgttcttctgagttattccaaacttcatgccaatcacgattagtagtggcagtggcaccagcaccaataacatctaaaatgtattcagctggattaccgtcgtcaggacaatgtactgctccatgagattcaaagtaatttaacaaagtcttagaatgttctcctatatcaccaaagtacactgttttaccacctttctgtagcagtaacaatctatcaaattgatcaaacagtacggcactgggttgatggattgtacaaagaattgcttgaccagcatcagctaattttcgcaagaaacaaacaatggaccatgcagactgactatctagaccagaagttggctcgtctaaaaacaacaataaagcaggcttcgcagccaactcgacaccaatggttgcacgcttacgttgttctacgttcaatccggagccaggagtaccgataattgcttcagcatagctctccatttccaaaagtttaatgactgattcgacatattcgtacttttccgaaagaggaacggaagcaggttgacgtagagcagcactgaaacgcaacgcttctctaaccgtagattcaccaatgtggacatcctgctgttgtacataaccagtgcgccgttggaaagttgaatccaatcctctaccattaaccaacatgtcgccagttactacaccagtgtcaacacgttgagcaagtacatttagtaaagtggttttaccagcaccggattcacccatcaaagccgtcaatttacctggaacaacaaagccttgcacaccattaagtaaccggcgatgctcaccttttatttgaatgtcgtagttaagatttctccagctgaaaatgtcatggcctttttcaattccttcatattccttgttaagctcttcttcgttgtccggagactctttaacaacgtcaccaccttgagtatcttgaccagtttctaaatccagcggttttccaccttcattgacagctgcttttacagcgtcaggagcatggccgcggcgaaagaccagatattcacctttcaaatcgttgaaattaagagtttcactggcgacgatgttgacaaataccaagaacgcataatatccaataataatagccaaatttctccataattgacgcgtcttgtagttgaaactaatatacaagtaagttgagccgtcaacgtaatctgttccaggttctgcagaggtgacgggacagattttgttagctacaggataattgtcatatccactaccgtacggaatcaattgagagcattcgaactgtcgtgccttgaattcattaatcattaaagactcaaaaccaaattgcaacgggtcgagataagcaatccagcggaaccaccatccaacgtcgatattaggaatagcataaccagtgtaaatggcaattgcaagcacaccgataccacccaaagcagatgcagattcaacattgggcataattccagctaatgatcgaaaaaaggcagacatacaagtagcacctatgaaaaggaacaaaaagtaagtccaaaatccgccagcagtcctctttaaatttgttaaaaaatacaacacaattgagaaaaccgaaatattaatgaatctgaaaggtagatcgacaatcaagctactaataacatctgcagcaggatggtacaaagcagaagctctatgcttagcaatgatgggtcgttgggaaaacatattagcgatttcagaaagactctgaagtgcgcaaaacagaatagagaagaaaagaacaccaccacgtgagaatacatcaacggtgtttaatttcatatcgtagaaaatagaaccgataataagagattggaaaaggaaagcaaaagccattgaaccaatatatgcaggatcattgatatatctctcccatgacctagctaaacaataccacaactgttgactaaaagtcacagtatacggagaggtatccttaacacgtttactcttttccgctaccgcactttgacgatagagctcatgcttggtagtggcagagatatcgcttccaaagttgtctttttcgggggcttcagaagaagcaggagtagtctcggtccaccgtttgtcatagctttccatttcggccataaggtcagcatatacagaactattgcgccacatttgttcaaactcatcaggggttctgggaacgcgattttcgaaaccctttctaggaaacctagccttcgggtcagaaatagcagtgaggaagtcaggagttgtttcacgaggatgacagtcaaaccccatatctaagaagtattgcttggctttgtcagctggtccataataaatttgcctaccggcataaagtacacaaattcgatcgaaaagtttgtaaatcttttccgaagcttggtatgcagtaacgaaggatgtcattttaagttcattggcacaagtgcgaaggacattgacgaactcgaaagccgtactagagtccaaaccacgagtactattatcccagcaagcgatagttggacgagtagcaaaaccttcactaatagttacacgcttacgttcaccaccagagacaccacgtacgaaatcattacctaccttggtattgaaagtgtgtgtcaagccaaatgcggtagcaattaaatgcctctcacgactcacatattcttgacgggtgaggttgcaaggacggttgtttggggtacggcatttagccgcaaaatcaagggtttcagcggtagtcaaagatgggaaatggacatcgttttcaccactgtataaaagatcaccggggaaaaactttttcatgtcggccttgtcaataccgtcataatgagtggttccctcgacacgcttgtagtgaacagtatcgctagtaactgaacgcaagaaagtggaacatccagaacctggttgtcccaaaaccatcaccagttcaccagcattggcaagagcatgacaatgacttaaaatggctttttccaccacttgtttttcagtgatagctcgataaggttgtaaaaaaatatcaggaaatgttttcaaaaattcatatccagaaccaacgccataaacactatggtcgcgcatgcagacaccactactacgagtgatgatatcgtctcgttgtaaagaatctttgtatgctcttaaataatgcttcaagttgaagttttcccctagttcaaagggatcaccggccaaacggtcgaccgatgaatcatcagatgaggaagaatccgaattcgatgaggattctggggagggttcgtttgatgaagatgggacgtaactttgattaccttttgaacggtattcctcattagtgtgtgatgccttctcattggatgaaggattagaagaatctaaagactcgtcaacattcgaagaagaatcctcgaaatgatcagaggaattagaaatacgcgtaacctcggtggtatgatttaaagtactgcctaaggcctgaccgtgagtagtatccgaattttgattcatttcgtaatgtaaaaaggaatataaaagggaaacaaatcaaaatagaacaggataggaaaaaagaaagtagaaaaaaccggaaatgatgttttatattagtaattgaacgattcaaaagaaaaaattttgaaaacaccacgatacaattgaaacaagttgaactctataaatcgagctgaaaaaaaaaagcagatcgacgtccaacgatttaaaaaaaacgagaaatgaaaagtttaataaaataaacgacaaaattaccaaaacgtaagaagaattagaacgctatttcacaagacagtaaacttcaagttgtgaaaataataagaaaaacgcaaacgaaagtacgtgaattgaacgaaaacgctagggaaaacgaccaacaacaagtttaaaaaaaaagcgaaagcgaatcgcaaccagaaagactttcaaacaaaattagtgagtgatgatgaagtaagcaaccgagctcactgtacactgaagagaaaagttttattgtttaacaagtgggtgaagaaaataatttaaaattaggagaggaacgaatggggaatcgaacagtactttttaagcttggcttaaaaagcagtaagattactaaaggaagaagataaaaaaatgaaggatctcctttggaaagttcaaatagatactataacaaatatagataaatagatatgtatacggttgtatgtataaaaaatatttatctatctatatatattttataatatatagaaagaaggcttcttttttattagagtgaattttcccaaacgcaataggggaaaaaaaatttcgttcttgtctgcctgtgagattgctcgtaatacgaatcgccaattcgtgttgattcagactcctactgaaaaagtgaaagacgactggtcaataatacgagtaaatgaaagttttataataggagcagggatgaaaacctagcaccacaggtatgcttatgacaagaagggaagagaaggggcaaataggaagaagaaagaagcaacgccaattttttagaagaggaactagtttcaaagataagaaaagcaaaatttcctgaaaaacaatggctttttgcaggccacgtttcaaaagaagaaagagaatccaataagtttccgcaagaggaaagaaatgtatctagaagacaggtaggaagagggaaatggaaatgcaagggaaacgggagaaaaggtaagaaagctaaagcttcctgaactccaacaaaagcttgaaaaccaaacaaaaaggaactaaatcgagataacggtctctacgaactcaataaaaacgacgtttcgttgcgcttcaaaggataaaccagaaagcaagttggttatcgagaaagtagggagcaatttcttcgttctttaatatgaactgccaaacgctaggaagatgatgtgaaaaaaatggtggccgctgactcgctttagtaaacaatttcgttcggcgctttgactctccggagtgatgtcatagaaaagcgatcgactaaacaccgaggagcaagcaagcgataaatttgccttgtataatagtatgactaagacaactcgataataagagacgcaacaagaaagagagggtttagagacgaaatgagatgaaaaaccgataaaaatgagtgtaatatgagagaaagaacaaaaaaaatttcaatgaattaaaagcgagattctcttgaatcaaaaagattgagaaaagagtccaaaatcccttttataaagtgtttaacctcagaaaaagcccaaattttctcgaaatttcccccgactttagcatagtttttattattttacaaagttcttttgtttgttcataatttcagagattgttttgcaaaccaacaaagacccgaatcgtccatctggtacgagcgctcatctttatctttcttttgtttacatgtcaaagggaaatacaaaagtgagtgaaaagtttctctattttcattcaaacttcctacttcttggtctattttttattcaaatgacttgatgaatttgaatattggtttaaaacctgacaaatcctaccttttttccatttaactacgcgttcaacgtttcctctcctgcgctacttttagctatagacacttgctctctcactctctcagtaatgtaaatttaacgacaaatagcgttttcgtaaacctctttagtagcgtttcctagcagcgaagcactcaaacatagtcgggatcgtccaagttccgaaattaccgctgcgcggtcaactacagcatttgctgttatcacgatacagcgatacgcaagaggctaatttctaaattccgatgcccgatgtccgagcacctcgcgtttgagaagtgtcgcacatttggcatcaaatgcagctcttgcagatctgattagtaagaaatgagtaagcgcaaagaataacgaggaaaagagaatgtgttgaatggaataatgaggaataaaggagtgcgatcgggaagattacgaaggagagtagatatactcaaatttgcaaggataaaggataaggattacgaatagagatgattactgaagaatttgtgagcaattgttttttttttaatttatctgattaaattggaatggatgtccagtatagaatatgttcatgcactctctctgcactttgcaagatgaattgcattgtaacgatcgagtgcgctatgtaatattacgctgcgctactgttttattcccataaagacttgaaaaggtaaatagccaaactgactttaaagttggttttgactttttctcctttctagcataaatactgctgcacattggatcagttgttagtaagtagaagattgagtagctagaaattgtagagagcgaaatattctcttgaccgattacattcccactgtctcccgtttttgttttgcctactttgtactgcgtcttcatcgtttgtccgactgtgtgtgggcgccatgtttctagctagtgtgcccagtacgagaagtttctattactgagcgcatgtcgaaattactgggcaaatttgacactttgagagcagctcgatcgcatcgctctcaaagtactaaaaaattgtccgtttcgatgctgcgaaaagttggacatcatagtgcgaagaccatcgtaaacttgcctatcatgtgttaataacatggtccaacatgttgatgaagcaatcctaccaaatcggctacaaatactatggcacgaaatacgtgaatgcaatatggctcatctctttacctctctctataggtaaatatgtaaatacttaaggcaaattaaattcttttttcatccacttaagcattttaacgtgtcatttcgcactgctttgtattttattaatattttattaaacaaaatgcgataactagcgtaatttggaataaaaaaacacccattcacctcgtagcatacacttcgctcgtgaacgctattttccacttccactatctcgtctagcgtgaatgcgggcatagcgatgcagcgacacattgcagtatttcacaattacaaaagtgtcgatctttttgttgttgcgctaaatagtgtgctactaaacattttgatacattctataaactcgccagcgtttattccatttagtgtctttctcgtattttgaattcatgtgtatgtgctagtaactaaaatttcttctcatccaatttttttttttttttttttttatttaaattctcttccaaccaacttctactcgttcatttttctattgacatttgtgtttaactcatacctcgtaataatcacgtttaccaattcgacgaccctcagcaattgactctctgagccacatgaaatcattttcttatttttttttctaacttttttgaaactcctcagcacgttcccacaactttttagcagtgtcaacaaagcattcctcatcggagcgatacttcaatccaatcgaccttgagtaagaaccatccaataccatgaatccaggattgatagacgctttttcaggcttggaaataacttgttgcttgtcaggaaagtgattacgaagtgtgctgcaaatttcctctgaagtgaataatcccttgcatgcaatcattcgaccgttcgataattttttgttttctagcgctaatacatgagccgctgctaaatcgcgaacatccacgtaataataataaggtgaagaaggattggctttggaaccattgatcaagctccatatcaccaaattcgatgtgtttagtgagtccatgttcttcataggttgaattggcggtccaaacacataaggaggattgactgtgcaaatatcaaacgaagagcgcttttgcgctacataatctctagcggccctttcggcacaagtctttgacgcacaatacgcaaaggttccgtctttcgtacttattccctgctcatacgtgatgggattccaatccttctccgtatacactttaccgctattaacgtcgatttcgagattaataatggcggcaaaagaggaagtaatcacaatgcgcttcacacttttctcaccatgagctgcctctaagacacttagtgtgcctttaactgctggatccaagagttgtgttttgttgtcagtaatattatcaacaaacaatggagacgctacatgacaaacgtaatccacattttttatggcatcttcgaatgcattaggatcgacaattccttgacaattacaaattccacttcatccttaaaatcaggattcaatcgaacaagttcattcgctttttccatgcttctcaccgtaccgcgcacatgatatccagcttgtagcagttgtttagcaacatgagctccaataaatcctgtaatcccggtgacaagaaccagtttttggctcattatgggtgattaacgattttagcaataatacaattataaccttgttacaataaatataaacggtagtgtatcgtgcttatgtaagcttgcttaagtaataacaaccttagtcagcgtacgattattgtcttactttcaaatttgcactaggactttgcgccttgtcatatatccgccagctttcaaataatcgcttcgtaataccacacaaaccctatgttaagttaaataattgtggaatggtatcaatgaatgagtggattaattttccagtacaggtaaattcccacctttttccttaactgaaaaatggatgaaactgaaatcatgaatctgtccaaggaattccaaacgtgacaagaacaagcagtcgttgtttgttggccaagttattagtttttacattacaaatacagaacagttgaatgaaagcacaaaagaaaaaaaaatctgaaacagccatcaaatttaaaggcaaacagtacacaaaaaaaagtatttgtttatgaaaattattggtagtgcagattatctataaacatgtagtggtaatagtaaaaaggtggtgtattgatattatgatgaatgaaacctatgtagttcttcaagaaagttatgcttaattcagactacattttctggaaattcttttgccttataactttgatgaatttcatctatgtatttaatagtatatcatttagtgatgaatagtgaataaatttagagctccttatgtgacaaacaaggaattaacttgcattcgattcgttcgtctagcactaaatgaatctgtgttatttgtgtgtgtaaagagattagtaagtaggctctaaaaaaaaaaaaaaaaatgtgtgtatatttttaatttattttaaatatttttctccttcggttcttttcttcttcttctttttttaagttttatttatttatttttttatttttttattttttttttttaatttcaaacagctatgctatagtctagtgcttctcttgcaatttgacaatgttttcgtaaattttgccagataaatgagtttttgagcaactatttaaattcggtttaatatatttaataaacctattttattctatgtcgagagaagattgagatgattaatcattccctctatctattgattgtttcattcattgtaactaacaaattctatgatacttcgcctatctgatttaccattattctcactgtactttcttaaaatgttccactttggatggtttggattctaaaaaaagaacacttgacttttcctttttttgcaaatccgaatatttttaattcttgtctttttacttctttgcccccctttcactttcttctgctcctatcgtctccccctttttttttccatacctttcgatatctgaatcctaacacaatttcctaatgttcaagaaaaaagaatattcgttgatatataaaacaactttaattatcattctttaagtcatttcatgtttattattttaattttagcttctcttttgaatgcttagaggcactttttttccttccctgttaattttttgcattccttttctctcttctctttttctatttaccttttaacactagcactgctttatcccatgcaacccttaaatgttcgaatcgatagataatagaagaatcatgtaaagactaaaaggtgatttttctcccttttttttttttttttttttttaaacgacttttattgtattgtcattttgcaaagtgaaaccaattttatttctattgacccaccactacttttactaaaacaacaataacattaattccacaatttttttttttttaccatctcctttaaatcaaaatccaggctaaaccattcacaccacctcttttcatctcttcgttttccttccgcttttttgtctccgtcgctaacgggatctctcatttgtttactggttattccttcattcatcaacatcacactgtctttctttccaccactcaccatgccaagtgcctgaattcatctgaaccgtttctgttttttgcatgttattttagggatcgtatttccatatcttttctttctcatttatttccaattttacatctttcctttgattatttactttatatatatggacagatcgacatactaacgtgcacttaccgcttctagttagtctccagtgtgtgaccttttcgtcattactttggtacatttcccttccatcggaaaagtaagctacttccattcttattcatatttcttgtcttttccccatttttttttcttttgtagcagcgaagaagaaaaagggacattcattaaaaccatctccttcaaaaactcgtagtttcggctcatccactcgtttcctgtttctgtttacatttttttcaccaccaactctcactacttctcgctgctctgatcccaaaactaccttacactacactacactacgctgtactatacatatttagctaggagaaagcaatatcactaaccaacgaattacgattttttgcccagtttcggtataatacttcctccttcaacccggccttccgacgtgattttcgcattctctccttatttatgaaaaatagtttcccctcccttttaatcagctgttaagcgtccttatctgcttctttctttataggctttagacgttcaatttgctgaaaattttgtggttccgtttctttgttttccttccgtgtttgctaaccttttttcgttgtttttggcttcttctagggaacgtctcggctcagtgctccacaataagctatcgcttaatttcactcactcagctttaaaggaatactggagtggaacgcataccctaataccggattggacactttaaggctatagcggctttgaaccccccctttgtactagtaaaagtaggtgggtgcaatatcttcgtcgtaacctcaacataccactttacttattaatagacataattcgttgaagcaaacgagagcttttttgctctcttgcctttgttttcttcttatttatttttaatttattaaacatttctctttttttgacgtttctccttcgttttgacaatattacgagcattggctcaatttcttctcttttgttgaggtggtaggccttcagaatatcggttggaattttctttttcattttgttttctcccttttctttattccatttacaactgtgcattacgctttacctacgaaatcctagttgcttcgcacttccctcgtttatcgattgttcgttcgtacatctgttccgtttgcattccaattcaatttaattaaatcaaaaatttcatatctatttttttgttaaattgccacattttccatacagaaaacatgagctcttcttctaataccagcagtcatagatcttatggcttacggcggtcccaacgctccatgaatctaaatcgtgctactttgctcgctcctccaactccatcgagcctgtatgatgctaacaattctacttcatctacctcttcgcaaaagccaaatacctctttcactagcttattcggtcctcgcaaacagaccacttcctccccttccttctctcatgccgcccctcttcaccctctttctcctccttcttttacacattcacaaccccagatacaggcacaacctgtacctcggcggccttccctttttgatagacccaatctggtatcacgctcttcctctcggttaggtgattctccatctctttctcctgttgcccaggtggctaatcccatccaccatactgccccttcaccctcagacgttcgtgcgtttcccattcataaaaatgcatctactggtgtaaaacgaagtttcttttcttcctccatgtcaaacggtgcaatgtcccctccttcccactctccatctcccttccttcaaagctctcaacacatacctccttctactcctgctcagaagctgcgaaagaaaaacaattttgattcttttcgtatctcaaattcccacatctctccatttgcatcgggctccttctctccttttgcaacttcatcgcctaattttttatcgacttccacacccgctcctcctaattcaaataatgctaatccttctacccttttttcgtccataccatcctctcgacacactacctctaatcatttcccttctaactccgctcaatcctctttgttttctcctaccgctcgtccacttactgcacgcaagcttgggtttgcctccagccaaactaagtctgccgtatctaacaaccattcacgaaatagctctaaggatgcatcatttatgatgaaaagtttcatcccttctaatcgctcacatcctcaaacccaacaaaatgaatcttccctcttttctgataacagtatggttaactcctcttctaattcattctcccttttccccaatgctactctacctaacccaccctcatctgagttgttaactactccctttcaacaaatcaaacctccttcccaagtttttatgagtacaggtcttttatccaagcaacatcgtccgcgaaagaatattaactttacacctctccctcctagtactccttcaaaaccctctacctttgttcgtccacattcttcctccacagattcgcctccatcaccctcgactccttccaatacacaaaccgactcttattttattcaacgggaaaacactcctacaaatcacaattccattcctactattcagttggagaaaagttccatggactttttgaggttcgatcctcctccttctgctgtaaaaacttctcacaactatggattaccatttctatctaatcagaggtgtcccgctacgcctactcgtaacccatttgcgtttgaaaatactgtttccattcacatggacggtcggcaaccttcgcctatcaaatcgagaaataataatcaaatgtcatttgccatggaggaagaagctgatgtatctcaaccctcttcttcaagctttacattatcctttccttctgctctcacctcgtccaaagtatcatcatctacttcacatttgcttacacggtttagaaatgttactttactaggaagtggagagtttagtgaggtttttcaagttgaagaccctgtggaaaaaactttaaagtatgcagtgaaaaagctcaaggtaaagtttagtggaccaaaagaacgtaatcgactacttcaggaagtctctattcaacgagcccttaaaggccatgatcacattgtagagcttatggactcatgggaacatggggggtttctttatatgcaagtcgaattgtgtgaaaatggtagtttggatcgttttcttgaagagcaaggacaactttcaaggctcgatgaatttagggtatggaaaatattagtagaagtagctcttgggctacagtttattcatcataaaaattatgttcatttggatttaaagcctgctaatgttatgataacattcgagggtaccttgaagattggtgattttggaatggccagtgtttggcctgttccgagaggcatggaaagagaaggtgattgtgaatacattgcgcctgaggttcttgctaaccatttgtatgataaacctgctgatattttcagtttgggtatcacagtcttcgaagctgctgctaacattgttcttcctgataacggtcagtcttggcagaaattacgttccggtgacttatcagatgctcctcgactttcttcaacagacaacggttcatctcttacttcttcttctcgtgaaacaccggctaatagtataataggccaagggggacttgatcgcgttgtagagtggatgctatctccagagcctaggaaccgacctaccatagatcaaattttggcaactgatgaggtttgctgggttgaaatgcgtagaaaagccggagccataatttatgaaggtattcatggatcttcttctaacccccagggtgatcaaatgatggaagattggcaggtgaatgtttaaaccttttagagactcttgttctcaatgtttattactgcgaaattgcgaaataagggaatggcttccaaaatctgtttagcttcataaaagcaaacactttaattatttttaaacgaaaagtttagtgattggtgcttataattaattttggttcattaaatgctttttttttatttaaggatacgtgtccgttttaaccgaacccttaaattttaaaaaattttaaaaaattattagatgatagtttttctatttaattttttgccttttcaccggattatctatttggttttcttcagtcaaatatccggttaattatatctgaggcaatatgatgatggctatggaaacatgccattcagttcttgatatggggaactagaatgtttccttaatttaaagccttgacgccgcacatactgtacgtgctttgtctactgaaaaaatgttagtgaacgattgttttttatatcgcaaatcctttctctaacatgtagactcggcttcagaggagttattattcctatttttcatctattttattgtctaatttcttatgtcactcgtttgttatcgacttgatatgttgcatttactcatctttgctagcataaagttcgaatcccgactgtttatccacttttttttgacttctgttttcataataatttagatcgatcgatgacactgcctattattcttgtacatagtttacgatcttgctgaatggcaaataattggttatgtttatggaaaatgccacgatttactaacgaagtttaataacccgttagattttttattattatcatatcatataataattagtaataatgttaacgttatgcttagttccacttctgtaatttttaatttccctttttttttatgcttgtgaaagctgtgtatatgctcaagtttgtgatgccttcaaattagtataggattttaatgacccgtttaacacttcatatctaaataaacatttattttgaaacagaaaagttagaaaattcaggtatcatcacgttttcatttatcagacacaagcataagctataaactatttaacgagtgtctcattatttcactaaacaccttcaaacattgaaatattactttgacaacagcacgggagaaaaatgcttgggagacgaatattttctccagctccaaacagaggatttattttatgcaatctcatacaatctaataactctacgcgaagagggttttcggacaatcgaaaatttaatgagagaaattctgaagcatcttcaaatgtaggatttcagagaagagttcgctcaaatattccatcatatttatcagcctccgtagaagaaggtgatatttactctcccaatgatttactgtttgaaacggtaaaggcgaaaaatcaagccaaattctatgaaccagtaagagaagattgctttaagacggtgaacgaaaaccctatgaattattggaaaaaccccgtaatattgtcaagattcgttactgaacttggtcgtattaaacccagaggtgatactggcctaacagcaaaaaatcaacgacttctttctagggctatccgaagggctcgagctgctggtataatgccgacgaaatacaaatcagtttattcggaaaattaaattgtactgaatattaacaaggacgttctatatctcatttcatcacattggtagatatacttacccactgtcccttactttttttttcttaaggaacgataaacgatctactttactttttaaatgattagctcacgttaattaatatttcaggtgtactttggttttgaatagtcttttttggattaaaatatacatgacacaaaatcataaaccgctgctaatattagtggctaacattttttaatggctttaaaaatataatatctttgttatctttaatttttaatttagcttgattgaacttttttgtaggaggagcgttagtcgatacaatgtattaaaaaaattatctagtagtagttattttacttatctaaagaggacagagagggaagaacaaataattatatgcaaaagaagaaaaaatccatctagaaaagaattgggttttatagaacgatattaaaacgatgagtgcatcatggagctagttcaaaatatatgcaatagggcttttcatgaaggtatatgagataaaagaacagaagttaaatcagcttgtggtatgtaattctccgactttaacgaaattagagatcctgagaacttagaagaatgacctaaagctgtaaatagctgagcactcttatagggatctgaactctttttatgaaccctttgaatggcccactcgattgaatataaagcttcgtgaatggcttgcaaaggtggtatattacaagccagattcgatgcaatggcagctgtaagagagcaactttcaccatgtatacttttcgtggtattatatggcttctcaaatatatagaactcctttccgtcataaatcagatcggccgtccatgacttggaatctggtttttctgtaatcatcatatttttgtcaaaagcaacatgatggcctctcaggacaacaaatttgggtcctagccgatgaataatggacatgagattttgaatatcaggaaacgactttagaggaggaggtgacttctttaaagtcttttcaacgagtataaaggcttccattacattggatgcgtaaacgagaagatgggggaagagatgctgtatagtagcgggaatggtaggtgtttcacacataacatttcccatactactaattatcacagaatccattacgacatcggttattttgtattttgtcagtgcctgcgaaataactggtatgcttttgggatcaggaagcataccaatttttacaaccctgcactgaatgtcgctgagacaagcatcgatttgtctctgaattaaactaggatgaaggggataaatcccagtaattccatgagaattttgacatgtaagcgcagttaatacgctcattccgtacacctggtgagctgtcatcactttcaagtctgcttgaattcccgcagcaccgctacaatctgaacctgcaattgtaagacaagttgggtgattcgttttcgcattatgggattgattcgcttccatattgtagtgttgaaagaaatcaaaacagcaagtcgtaacaaaaaaaaacacaattttaaagaaaacaaaaatatgtgctcagacaattgaacgaagcacgaaaaaagaaggataaaaaaacaacaagaagcgcagaatttcgcttaccaaataaaaaatcgttttaaaaacaaattatggttttcaaacctacagcaagcttgctgtaattcaacattccctaatgaagggtcaaatctactattccaaagacttttaaagatatgccacaattattgtgtatttagagaaagagggagaggacaaaagaaagaatcaaaagaaactgcgacatgtgggccggaatttaaacggcatacagaagcaaggttacatgcaaatcgatggaagcaagtatgcgagagaaggtaataatttttgcttaagcggatttgagtattcgcttaattttacgttaaaataaaggtaagataagcgactagtccgactaagtaaatgttcaagaaatattagaagaaataaattggaaatgccgttggcacaatggattttgattccaaagtttgtttacatgaatttacgaagcaaatttaaaaaaatatgccccaactccgataccatgaaatgtgtttaataacgatattctattccttccatgatacctcgtgtatggtgaacattggtatatcacagttttcaacgtaaattgaagaaatttttttaaataaaattttttttaattgaagaaagtcttttatggtcttttccaggagtttaagtattaatcagtttggaatgccgagcaaacccatttagagaaaaattttaaggcattttaactagtttgggtggttattagtaaatgaaagaatatgaatttgtatatggccaactcaaattgttgtacagtttgctcatatacacgactatctatggcaataagtattaataccactacctcgttagcaaaatacttttgtcaagaactcatatttatgacttgaacaattattactataaaaaggataattatatagaataaaatttcgagatattatgtcagtcaaaatagcctaaaaaattcctgttcacttaaattcttcgtcaaccacattcaatatgaagttgattcaaaaaaacatcgaaaaaaatggctccggatggataaccatgtgccctgaagagccagaagatatgtggtatgcctggttgctgtatatctgcaatcaatgcacaaactaacttagtttaggcatttgtataatattcttcaagttggagatcagctgaaggcttctacagttcggtatgaaataaagtgtatcttcaatgttcgataataacacctgttttttctgttgtttagtcgtgtagtgaaagttggcgctacaggaagtacgtcaggttcaagagttgtgatgaaactacgtattttagttgagaatatggactttgatacaaaggctgctcaattgcacatcaaaggacggacaactgaataccatcctgaagttaagatgggatcctaccataccttggacttagaactacatcgcaattttactctatataaaaatgaatgggatgcatttgcattggaccgtgtagatgctgcttgtaatccttcaagaaatgctgaaataggtgctgtggttttagatgaaggtaaatttcttggcttacatcgctttattagttcgtgcatgtttactgacttgcaggtcttgccaatatttgtctcattacagattatatgaccatcctgcgtcaaaggattgatcaagtgattccaaggaaacggagaggggacagcagcgcttaccaaaaggtaaatttttagactttgatttttcgtccgtactgatcaattttttagggccttgataaattttatgactctgtttttcaatccattaactcagaatttgattttgataaattgaaagtcgttattcttgcttcaccaggatttgtggctcgaggcttgtatgactacatattcagcatggccgtgaagttagacttgaaacaaattgttaaatcaaagaataaatttgtcatccttcattctagcactggtcatattcattcccttaatgaaattttgaaggaccctgctgttgaatcaaaactagccgacacaaaatacgtacaagaaattcgcgttctgaataaattttacgatgtcatgaatgaagatgatagaaaggcatggtatggtccaaatcatgttttgaaggcttttgaacttggcgcgatcggagaacttctgattagcgattctctgttcaggagttctgacattgctactagaaaaaaatgggtttcattagtagaaggtgttaaggagattaactgtcctgtttatattttcagtagtttgcatgagtcagggaagcagctggatctgttgtcaggtattgccgccattctcacttacccagtcgatgaagaggatatatcagaagatgaagaggatgaggaatcccaaaattttgaacatagttaaagttcatcagtatccgaattgtcatgaatctaattattgctaagccaatatttcatactttaagctcggttagaacaatttgtttcattctcttaaaaaatttatttatgggctcgttttggtagtcattatttatgcttttacttggatgttttagggtatttactatgataaacatgcaaaaaattaggtgttagaatggtcaaaaattgataccctaaaatgatttatacttatcgattataactcttaacttgtaaaattaagctgttaattatagccggtccaatacagtattcaattacagtaaaaaaatcaactttaagcgataaattcgctacaaacgtatttgttgaagttacttttttcaaaaaactaacaattcgaaattgatagtggctcatttacttgcttattttattaaaagttcgcgccaagatacttattcaataagggggtttgacccttctaaaagctaggcaggtgtttgaaaatccggaaccaatatatagacaaaagtaatttaataacgaaaccgattattgaatcaatcaattcaagatatatcactggcgatatacaacagttttaaaattcactcaaaaatttatcaatcattcataagatgaaaattaggataattaaatcagttccgtaaaactttgatgttctgcgtaaatttaaaaagaaaagatatgactagcttaaccaatttaatattccataaaggcaatgtacttggagagcatgtatgcttccgggaatttcatatttgtatgcacatttcgtaaaagactgattgtgtatatccctatccacaaatgaaaatcgaatgacagtattaaattgataatcttgacaatatatttccgaaaaatttattagatttatgtacatttaatagaccaaaaataaaggaataaatagtgactgaatcaatcactgctttctagttctctgactttgagacctttttctcattcaattcggctaataacttttccgcagtactaggctctttcacacgaatcaaatacatttcaattgattttccatcagtagaagcagcaggtacttttacgtcctttttaccagccaggctgtattcaaaatcctggcacaaacgaacgtttaacaaaagttttccacttccctcgacacgcgcaaggatgcgagcagagccagtgtcacgatctacgttaatttttaatggaccaatcccgatatcagaataagatttactagtagcatcgaaacggtatatcttggcccttgtctcaaatacgctgtcttcattttcttcgccttttcctttaccagaaactagagaatcattcgatcgagtttcatcatttccgttttccttttcttcttgctctgatttgtttccattagaagtttcttcacttttttcagcgccaacagaagctggagtagaagaagtaggaaaagaagatttcggagcagcaaaagagaacggattagtagtagttccaaatgaaaagccgacagccgcagcgctaggaggcttcacatccgaagaggccggtaactttttgctcgataatggattggtaaatgtaaattttttctcaggtgtgtcaaatttgataggcttatcaggagtccaagaaaaactcatagtatttcccttggcaggttcaacggcgttctcggatttttcattgttcgagggtttagattcttcgctctttgaatctttagtttcatgggtttgtttggtctcttttgaagcatccgcagaagccatagtcgttgagaaagaaaacacgggagttaatggttttgattcctcattttccttcttagcgaaagcgaaaggattagcggcagtattgaatgaaaactggttggttgtggtagcggcagtaccagtggcagtttgattagaagatgtttctttctccttcgcttccgcttctgttgcggacttctcaccaaatgaccctttaggagtaaaagccgatgaattaaactggaaagagctaccaagcgctggagcagaaaatccgaacctaggagcaccggggggaacaaggggcttctccttatcctctttttctgaagaagctggtttttctgtaacaaaagaagaagaatcttggcttttttgttgctgaggatttacctcagacacaacagcatttgaagttggttgttctaagaaaacgttagaaagaaatgaagtactaactataaacgcattaccttctgctggctttttttctatacttgaaaaatgctgcctgtattcatcaaacagagggctcaaattaccaaagggattattgtcaacacttttgataacagcgtcaataaatgatttattaagaccgcgttttttcaagtgaatatctgaatcattattagctgtaaccgcgggttttccaaatgtaaattgcgtagtcgatgcaggtaaagacaccggttttgctgccaaatttgcaaaaattcccggagaagaaacaccgctcgttggtctttttctagattttggctttgcaattctaatacattagtacctaaaaaattgaagaactatgtttcatcgttacatactttcttgtggccatcacgtctgcggaggcctccttaggaacttcaactggaccatgacggtcatcatcagaatcatcttgatccttagttaactgatgatcagcaccgcgttttgacattttgctagtttgcgaaggtcaactgttagccccaaaaccacccaaacttatggccttcactatgtctccttatttactaatgttacagtaaaataaaataatacaaaaaatgaattgtcgcttgattttaattaagtattacaaaaataaatgactatggtacaaaaattatcataataaagagcgttcagcttttttcttagcgtttcagttgggccaaaacagattcgcatctgtcacataatccgtcctcatgagctgtatgcatccagcaacgtagacatttttgttgatttgaaaaaaataaagagatatttgcaaccccataatccaactgaacttcaggttgtgtaacggaagctaatttcagattttcgggaatttcgttaataaataccttcgatgtattgaacagaaaaggaaggtcggaagagtaattttttaaaaaactcaataaagattgagattttgacttaataacgacataagcttctaatgagtttttaatagttagattttcacgagctgcggtaatcaacaaattaatactatacttaagttgttgaagaaccaagtattccttaattaaaaattttctatcaagtaaatcaacttttgaccttaagctgcttataagatgtgtttctccagcgtgaaaaggagtttggtaagaagaattcaaataactatcgggtaagctttgccaaatctcctgtgccaaaagtggagtaatgggagaaatggcccaaatgagcgtaagtaatgaatgataaaggacagtttgaacacttctcctagatacactgttgggtaaatcagcgtacagacgatcctttacggcgtcaaagtatgtagaggataagaaagagttcataaaataattgagatgatgaacaactttgttaattgaatatgattcataaagttctcgaatttcagtctgaaatttatctagttggactaaagccaacttatcaataccacgtaattcaccaacatcaactgagctcgaggtattccagtcatgtaagttcccaagacaaaatcgggatgttaatctccacttttttaaggattcaccaacttgcgtcaaaatgttcggtcccaggttagtatcattcgtactgtcacatgatgcaacccaaagtctcagtaaatcaacaccatatggaagcttttttccttttaaaagctttccgtttattacatcttcagggtcggttacattgcccaaagacttggattgtttctgacctctttcatcaaagataaatccgtgcgtaaacaaagtagaaaacggtgcttctggttttgattggtaggcagtgtatgtgagaagaagtgactgaaaccatcccctgtgttgatcgcttccttccaagcaaaggtcaatgagcggtttattcttacgaggtgctattgtagtccaactagtcccagaatcaaaccatacatcaagtgtttcagtgccacgaatatactccttatttctgtaatccggatgaacccactgagcatgcccattgttttcagtatcattaaaccaagaatcaactccctctacttccattttctcaatgatataggatacacttttcacagttagtagggggattttagttcctttctcatacaatacaggaatgggtaaaccccatgcccgttggcgagaaatgcaccattcaggacggccattcaaaaaaccaagaagtctggcgcgcgaatttggaggaatcatttttacactatcaagtgcttttatggcagttttcctttcattctccaatgatataaaccattgaggggtcgcccgtaaaattaatggcttatgtgttcgccaatcgtaagggtagcggtgcttataaggagagaccttaacaatcatattttgatttttcataatacttattactttctttcctccatcaccaagaacttccaatccttcaaggcttccatccaaagcttctttagtgtatcgaccataatcatcgagtggtgaaaaaggacgcaaattgttttccagtcctagaagataatcttccattccatggccaggagcgacatgtactataccagtaccgatatcattagtaacgtagttagattgtaaaaatggaaagctttgcttcggtaatagagggttctcatatgtaaatgatgaaataatatctgaagggcaactcgcaagacgcttagctccctgcataaaatccaagtttggaactaaattatcagacattaaataaatcgaattattgtgctggtatagaccatagttgatttcagggtggtaagataatgcaaggtttgaaggaatggtccagggagttgttgtccaaactaatgcctttacattattgtattcacatccatcgatagaaaaactgttcaccggaaacgtaaagtagatagacgtgctgacgtgattatcatcatattctatttctgattcagctaaagcggacctgcttgaagagctccaataaacaggtttattttgacgaaatataagatccttttgtaacaaacttaagaaaaccttaagctctgctatttcaaatttgtcactcatggtgatgtacctagaaggccaatctcccattacagccatacgttggaacatcatgagttgttcttgaacggccgaatttgcgaaatctttagcaatctttcgaatttcaagagaacttttacgctcggcgtttgctttaatagcttttgactcgattggtaaaccatgacaatcccaaccaggaacataatgcacagaacggcctttcagcaattgccaacgattgatgatatccttcaaaatcttatttagagcatgacctatatgcagtcgaccgtttgcaaacggaggcccatctaatagcacgaaagaatcttctttattcaaattctccttctgccattcatacaggtctgatgtgatggatttgaaatacttttcattatttcctttaacgtttggcttaataggaaacgaagtctttggcaagcatagtgattctgaatatttcttcaaatccgcctgactgctgagaaacctacctgcttgtttacaacaaatgtggttatggcctttcggcaaactgcttatatatgaaaatttcatatgtccgacgattccttataatccgagcataaaacgaatataggaatgaatgtcgaccaaactgggaattggtaacctcgtgggtacggtcccaattccgtatattgtactggtagtaactatagctgtagtctgaagtgccaaggcgtaaaaccggtccaatgcatagaaatgccattatttcaaatactatacacaaacgaagctagcatgtggacagcaaatttggactgaatgtttccttggatcaataatgatttatcacataactgtttaaaaagtatatgaatttaagagctgaaaaagtaaaaaaactcattatttcattgtatcattgaagcattactcaatctttctctgaagcaccaagatacgagtttctactaagggttcctcattaattaaatagttctcctagacgttgtgctttacttaaacagagaaaaaaaaaacatctggagactaattgggttaaacaaagggcatgtttgaatagatgtaacagatggttcggctaatgaaaagtaaaggcaagcattttcatgaaagatatctatagttttttcttttaaaaggaaaattttacagaagagcatttattatggttattattttctagtgattgtatcagctttttaagtttacgtattcgaacccaaagtagctattgtttttattttttatttttttaagtcatgaatattatatctaacgtaatatccagcagccaaatcttccatataaataacaaagtagtaaccaagggatttattctcattagatagccatgaataaataatatcaagaatataatcatctaagcatcttacagatcattcgaaatttcgtttgtttgacagctcttttaaaacacactgaatagatagcattttcaaaaacgcgagcaaccaacagaacagataaaaattttccatttgtataaaaatagtaaagtgatatttatacaaaggcaatagaagaaatagcccgtgccattcaaatcaatcgagattgttaagccaactaacagttgcaattttaaaccagttgggttaataaaagattaaaattaggtttttagccaaacgaaattttataaaacactcggctgtccgaaaagttgttggattgcgattaatttttccggtaagtttaagctgtgttctaatttatctgtttaacctgaagtcaagaaattttgtagtggaataattcttttccttttacataaacgaagtacctcatcgtgcgaaccgtagaatggtttaatgatagcattcagttgactgccccaacgaagtgaatctaagtaagccttttgagcttcctgcggcgaagaaaatgtcaggtaagctctcatactatccttccaagtaataattagatcaggttgtttaaaataacttcttaaaacgcgttctgtaagataaagtccttgtgcacttaaaatgtacgtagaatgactttcaacaacttctactggacgttcaatatgcttagataaagaaacagtatttttctcttccattcttcaaaacttttggtaccaaataagctaaaactacaacttcaatgaatattgaaggtatccatgctaagagtatagggtaaatactaagtagccgtttttttattgttgatcagcgtgaacaagattgccaattttcaatcatttatagcccaaatatcttaagaccactagaattaggctccgatacagcatatgctaaaatatgttttgttggatgccaagctaccttgttcagaggtccattagttggaattttccaaatttgatcaccagttttcgtatcagccttccaagttagtttattaaaaagaataaaaataagaaacggtttcaaacatcctgaaatacttacgatatccacatagcggtcctctgatccactagctaaatagcgactgtcataactaaagcttaatgtacggatgggataactttttagaagttagcgaccaaaaaatttaaaagaaactacatactccattctagtaatcgaccgttcacaaatcagttcttgtggatcccataaactagtaattgcatctgcaccaccaatggcaaggtgcctgttatccggactgaattcaatacagaaacaatttgagttatgcgcctttatatcgtaaactctttttagagaaggccattccataatttgcaccgtgccaagtcctgtagtcatgaaaaacaaatcttcactgaatgaccaacagcattcatttgtctattaatcgtaagcaaagttattattggtttaaaaacaaacctcacaaggttgttggaatgtctccattattcttctttcccgagcatcaataaaagacaacatatcatcctagcattcaattagcaatcgtgcgttataaaaacttaaaatattctcgtacccgactactagcacagcagtaatttccacttggactccaggttgcataaatattctcatagttgctttctatttcagcgataggtttggcgcctgaataaatagttaacaaacagtcaaagacttcattgcatacttctaaagtcccagaaacggatcattttcccagcatacacagccattaaccgatcagaatgcgtaggatcccatactagttgttcgacaagaccatatcctctgttccctaattcagtagtaaatttaaaatccaaacgatctgaattccaaacaagtactgatcctgaagatgaagaactcgcaagtctcgagccggaaagattccagcctagggaacgtataggtccctgttgcccttgtaaatctcgagttttcaattcgggaaactttggctaaaaagaaaaaagaaagttttagtattttatgctctagtttttataaatcattaacatacaagcgattctgtaactgaagcacacatggcaaagatcgcgtcgagacgtccaaagggatagtagtacgtggacagagtggttagtgtaaacttactgtctatttacaatattataaatttgacggtctaagtataaaaattaattatcatttagaatactaaatattaataatctaactcgaagaattgagctgttcggtggcctcatgttcagacgatgatggtggagtacgatgttcgtgtgtgctcacagtgtaaaaccaaggatgctggagagcttcactttcagatattcttttctctggattaatttcaagcatcctgttgattaaatcgattccctcttctgaaatttcgttttctaataaaggctctatcggatatgcaccttttgatatcaactcaatacattttgcttgtgacgaagatgcaaaaggaatagacgcagtaagcctgtgaattagtaattggaaaaaattaaggcatgaaggttcattgctaattgattaaagccgacaaacttacatcacatataaaacacatcccaaactccatatatcaactttatcatcataacctccgtccaagttgacgttttttgacttcaaaacttccggtgctagataacccattgtcccgcaaaatgtttctaaaaaggttcccgtcccatgaataactttagccaagccaaaatcagatattttaagatggaaatcatttgttataagaatgttctacaagttagactttcttatcaataaacaagatatacctcgggttttatgtctctatgtgtcacaccctgcttgtgcaaatgtaaaagcgtttctaaaagttgtttgagaagaggtttacagtcttgttcgtcgatggagccattagcaattaaaaaatccataagatccccaccctcaacatattccataacaataaataactcgtcatcattttcaaaaatttcatggcattgtacaactcctggctaaaagataagtgttagctaggagtttttcgtataaaaaaaggtgaacataaaatgatactcacatggtgcaaagattttaatatatcaatttctcgttgaaacatttcagtagctcgcttttccgaacttgtcaaaaggatttttcgtttgttgataattttaatagcataccacttgccactattcacttctaccgctagcttgacaactgcaaatgtaccacttccaagtgtacgaataatttcgtaatgactgttctcggatttaatcatgtttttctgggaatctcgtgaatgtttaactggtacctggcacaaaaaagctataagactgtaagcaaacttgaagtgaattctacgtcaacaatctccttcagtgtaaaggacgtacaaatttcatctttcggcacacctaggccaattcgaatttcatctccgtttgacaagatagttctactattcttggcaagccgttcctaaatgacgtcagtaaattgtaaacgaattaagctctcgcttacaaaattcagaaatgttccattagaagagtggtctgaaattgttagaaaaggtggaagaggcagaagactttaaaagattttttaatcctttagacttaccgtgtaaaaaaacgacattctcagattcatcggaatcatttctatgcccctgggtcatttcgttagataattatgtcttaaagagattgaagttcaattaaaactaaacgagttcagctggccactattattttatatacctgatagatttcaaaatgaaagttgctaactctaggtccgtttaaaaccacttcacaagatttatgacgtccaaatctccaaaacccattgtgcacatctgtagtaagaggaatcacttctgtcttaccatcaagcatgcgagtcataaccaatttcataaatacattttcgttgttaaccacctgtttggctatgttctgactaacatgtagtggtgcctcttgagtagcctgcgtagcttcttctggttcttccatagtatcttaaaaacagaaaaactggatgaattctttaaccatgtatatcagtaaacacaaataaacgtgcaaatgagtgatcaagcttttaacagaagtaaaaagaccaaagaagcagttatcatgtcagacgagggcttatgatttactgacttcgctttaaacatcgttataaattttacgatataaaatgtatcataagacaataataacgaactgttgcaataccagatttttcgcgaagcacgagtaatataaacaatgtttcatccacctactttactgtacgttatacgtagtgaggattaaatgttaattgttaagtagtagtaatccctatttatatttttttggtatacgtgaaggttgccatctgtcaacattcctttgtatttcaaacttcgacttccgcgattgaagactttgttctacggcattaaatagttttctgatctccttaattgttaccattattcaaaaatcttctataccaaagcaaggaataagaaatataatgctgattcttggtttaaccggctcaattgccacgggtaagttatcaaataacaattggtttaatagtggttaacctagttaagggaaatctacagtttctcgcgagtttcaagagaaatatcatataaaaattatcgatgctgatgtgttagctagaaaggtggtagaaccgaatacaccttgcttaataaaaattcagaaagagttcggtaatgaagtattacatgaagatggcactttgaatcgagcaaagcttggccaggcagtatttcaagacgcaggaaagaggtcacttttgaattcaataatacatccagcagtacgtttggaaatgctcaaagaactgcttcgatgttacgtacggggttacagcatagttattttggacgttcctttgctttttgaagctaaaatgcaatttatttgctggaaaacgatctgcgtgtcttgcgataaaagcattcaaaagcaacgtttgctggcacgtaatcctgagcttactgcagaggatgctgaaaaccgagtacaagcgcagatgcctcttgaacttaagtgtcagcttgcggacattgtaatagaaaataattcggatcttgagaccttatatgaaaacatacataatgtcctacctttaatcacaccttcctatttttttaccttactatgtttaattctaccgccattgcaaataactttacaagttattgcctttgtctcgcagaagaaaaaggtatctgaattcagaaaacatatataatccttttttccatattctttaatttcctcgtttgttatttaagccaatagtcttaatgtttttgcttataattagatcattttcataacttatctcaatatcttgcctcgagctttctatataaattcacgagtatatgttttatcatgatttgaaatgagaaattaaatcttttcatgcgcatacaaatagctgaacactacaataatgattaatgtagaggttctcgcttagatttctgggttttaaataagaaatcgattgcgttccttctttcattgtctgtatacttgggtattgaacttgtattaatcaatctttgctacaatgcgtgacttatatttatgtcaaagaataattaaattttttttgttagtttcgttgggttagctaattttttgattgatatatttgttcacgtatttacaatttacatgttcgcatccaccatcacttgaacaccttgtcagtaagtgttcagtagccaattttctggcaaaatggaatctggatctattgatttggataagggtgagtcaatttagtcattacaattatgctaactccatgtagagatagatgaattgagcagggttttattagagcatcctgctcatgtggaaaaagttttaaagaccgttgagttcgataaatctgcccttcgttatattgatgcaattttagatcatcatttgaagcagatatatcggaatttgacatccaattctcctttgcatacgctttctctacttcaaaaaatggcatcttggaataatggattggcatgtgttcgtgtattccaagctattgactggaacagtaaaatttttataaagatgctccagctacctaatcaaattcaaaattctaggaaaggaaataagcgtctcaaaatcactatatcaaaaaagcggtcctctttactacttcttttcattacattccttaggcttggtacaccagaaattcgactggaaatattaaattcaaggaaactaactactcctttgtttaaaggtatatacaatgatgagccttcggttcttaaggagctacttcaatgttggctcacttatgtgttactagatcatgatgtttctagggcaacaaaattatcttattttaatgaatggtcattgtcatgcttagcttctctttattcaagagatgatgaaattgatggcatttccttatgcaatcttgttcataaattttttgtcgatgcttgtacagtacctggtgaagggctttgcttcgtatcaaatggatggcatttacagaagaaggtggatggacaatccaaaactatttttaatcgtgtcttacagtcatttgttttttcattgcatgttcatacaagtactttacagcgggaattagtccttaaaatattaaaggcttgtccagatattacggcatcatttatagaaagaaatagtttgacctctgaaccggtattatcttatcaatggatttctttcgtttcattactccaagcaatacttggtatgggcattccttttcctttttacgatgcagaaacaagaacagttcctcctactaatattataattgagaacatattgccttcttccttttcaaagcctgtagtccttaaagcattgaacggtaatgacaaatttgtctgttttttaacggtgaacactctcttagcgtcgtttaaacgtttagagtctgtattggatgaaatcaaacgctctgaattgtctgaagataataaagttgaacttgtgtcaaagatatctgatgcaattttactacgtttacccgattctcaaacttttgtacagctttattcttctacagaatcagatttgctgaaagaaggactttcaaggattttactttattttttcacttatttcccggaaaacattttgaagttaaaaattgacacctctatatttctacggttagatctttcgccgggaatgttagaccgtccattttcacgtttacatgttgaaaatattatccaaattcttcgatatcttccagaagttaaatggtttgacgtagttaggtcaccttttgtcttcctatgcttgatgtatttacaaacaagtcactcaaagcttcgagatgcaatcattagcacgttaaacgatgtctttagccaaactatcattttctgtccatcgctcgctgtccctcctattttgacgattttagcttctcttcaacacacatctcctacgcaacataaagcagttttagaatttttaaattcgtgtatcaaccgttgtatatctcgagtttttgcttatttagatgtttgtgtcgactgttttaaaaagcactctgtgaattctcaaaaaaagacggcgcccgaggtttcaccaatttcggtaacattaattgagcaaataccgttttttcttcaaaagcgtgatatttctgatgactcaaaggatgctgtgctctcttggttaagtgatttgttctctaaccttgtctgtacaggcgaagatgcaaattgtcttttccatctattggaaaacgtaaacgttacagcatttgattccgattatactttaaagccttttaatcagctaatgagttttatcgaaagcttagctgttcagaaacttccagattatgtgaatcagataggaagcttgtctcaatatctgctttattcaaccaatgatgagttatcaaactctggtatacagaagttcggcatgaaccttgacttcctaccactttatgttgtaattattaccaaaagaattgctattatgttgcaaagcggagacatgagagttaagaaatttttggaactcatacgcgaattagtcgaattttctaaagaggaaactatggcaacttcgcagtcgccaatccggactttgctttcagcatgcataaatttaagaccatttcttttgcaagaacaatatatttcattcaatatggactttgcagaattcttgattgatactaatgcgtcaataaaaggttcagttgtgaacacgtgcgttttggactttttatacaagtcattttctgataaagtgcaagaaaactataatttaattcgtattgcagccaaatttatgctattatggacacaggaagaatttattgggttttccaaagctttggattccttcttatcagagaatgatgatttgatttataaaaatttggattatgttgctcctctgctttttgaatgtatgcagttcacttctactactaacgcaaacatgttttccaataactccatcagtgttttgctcaaagctgcgattcttaaaccaacgaaattaactcatggtatgtttgatgcactgaatacaatgaagcctattatctctgattttactgtatttgagcctgccttacatacagttgaaaattttgatttgaccgactgcgctgatgaacaaattttgctgctatcttcttttgtgaatttcgtgcctctatttaggaaagttatatggaatcttttgttaaataacaaagaagctttaattcaaaagtatgaattgcttgccatattgtgttgtgaccttgctaagcaatacgttgctgaacaatctcaatatgatttggagagaatccgttccttttgttccgaggttgttgaaaacaacttggatcttgttttgcaaaaatctcatttgattgaacttttgttccctcttatgaaattgagtgatcccaaaatacaatattatgtgaaagtgtctaatgccttatctgaaaaatacttgccccaaggagtattagaacttctagttcttcttcaaaagcgcattgacattccgagctctttgagagttcaaacaattatgcgaatatttgctattctcacaagagttttgtccgatagtccacaaattggcttgagtttagagaaatttttaaccaacttcgaagctctcattaaaatgaatgttgacattcttagagatgaaattgataagtctaccttaaacagttttttggagtctgccattgtgcacgttacttcattttcgaatcttcgtctttgtcttacgcttgcctttactatgactgctgagcaatgtgattcttcacggtttttacaaatgattttggcacatgagaaaaatcctctagctggtgaagatagttcggatgaaatcaaagcaactatgtctgcgatcatatgtaagcttacaataataggcaaaaattacaccttatcagtattagaccaaatattgaaactttttaaaggtcggtatactcttcatgattctctactttgtgaattactggcctactttgaaactttggatgatattagcgtcgcaagtcgatataaaggttgggtaataactgacgaatacgatatgatgcttcttgctcgtaaggacggttcaggggtactggaacctaagattgctgctaatactgtcaatcaatatccatcagagtgggagaagattgatttgaaggtgtttgacgatttggaaactaccgaagggctcctttctagttactgtagtaatgaatggaatagagaagtctatcatccactatatgctcttggtataacggcatcccttcttcattcgaatcagcaggtttctaacattcaagttattgtacaacaaaacttcctcggtatgatagtaatggggctttctctttttaaagaagaagcacgctttgcttgtcttaatttcctacgaaattttatacccattctggacgaacaaaaatttagagaaaagcatttaattaaactagtacttgctagtataattgtgaatgtaccttcttcagaaaatcggttgagcacgttaatggctaacttttatgctttcagcttgaccgtcatgatgaaaccgacacatccattatttgtaggaattaatcgttattacctgcaacgtcaacatgttgatgttacagatataccgatgtactatgaattactttatccatcaacagattacaccaaaagtgtttactggctactgactctattacatgctggtttacaaacaaatcaggatttaaaaatatatcttcgacgacacgtatttgaaatgatatgtactttatacaactcatgtgtagtcaacagtgaaatccgaacactaatcgaaaaaatattgctcaaggttgtggcattgggaggaggcccaatgttggttaaatacaatgcaatataccctatgctacaaatggtcataccaagttttcaagaaacaaaggaaaataccgtagtatcgaccacgtaaaaagggaaaagagaataaaagaaaaaatttttggctgctaaaatttagctaactaaaattatgggatttgcggggttgaaaggttagagaaggaaataataattcattaatagcggcacgatgataacttgtaatttcgtatctcgactaaaattctaataaatgtaaaaatatctgcgattgagttgacattcgtagaacgcgcacatcgtatgaaaaatttgttgttcaagaaaaaaagatgaagtcaagggaaggaagagaagtttcatgcacataaaaatttagagaccatatctaatggccatttcattttgataagtcatttccaaaggaataggggcagcatatatgtcggtttcgtctaggacagcctcacgattggcaagaatatctaaatgaaagtttgcagatcctcctaaagccaaaggacgagagctctatgcttgagtcagtaaaactaaagaaaaaaaaagagggggaagatataagtgcaacaataagtaaatatagcactatattagtctatacattaataacctacctgtgaagcgagtttctgttccatttcacgacgcacaggctcatgcaaaccgtaaattctacgcatgctatcaaggcgaatttgttgctgttgagcctcccaattctttaatcgactttctagaggatgtttattttcaacacggtgtacagctggaatgctgggctctaaaactgagactttgaagtttccagatacttcagcagctggttcgacgtcaggaacaatcttcattataaatctgtgagatccttcaattctctactttgtcgagtatatgtggtttaggatgagtttctacaatagtgaatcctctctcgtaagcctatcgttaccttgcatctatgttacctgttacgactaagattgaagtgttttacccttactatggaggacatactaagcttgcatgcgattactagcaagatggagccaacttaaccactaccaccatattaaaataacacaaaaaaccatcacaattggtattaactcgttccaaaaaaggcgataagatgtcgcaggttattcaatattcagaagcagatttgctatatctatcaaaatcgccgctcataaaaaaaccagaaaatctgcctgaatggattctgtaagttagggatgctaaataatcttggttgatgaaaacaccttcgagaaccaaagtatggaatattggctaacgttttacagtccggaggctatgaaggcagatcgtgaacggcacattcgccaagaaaaggaaatgaaaaggtagggcagaaatatgaatactgtgaatttcgcgacacaaattgattttagttctttatttgcacttcataagttctttagagattttatactaacaaatttttgtatagacatgatgatgatggacgacaatatcagtcagatcgtaaattcgctaaatcaagtaagtcattttgtttactattttctgtcgactgttaacataaaaaattgtctgtattgactatgaatccttacaatgcacgttcaaaaagatgcggcaaaaatgtcatatggttgtttactacaggattgattataatgtgaatccattctacctttttctgcatcagatatgaggtcgatgtggaattcgtgtttttgacgttgcttccttgacattgtcgatagattccgtctctttgttgaaatccttactaacgtttctagaacacgacgatattattcttgggccaccgaaacttagttttgctagcagtaatgagaatggcaggtctgtcggtcgccatgatgatttgctttctttgggaaatgtgtataacggtgtagcctctctccgttatcgaaatggcgcttctgtatcgcggtcgtcatccattggtcattccggttctactgcaccatggagtagtgtaggacgacataatcgcaagaaagacaatgaacatcgtgatgagatggaggggcttgagaaggtgatgaaacaaagggctggtaatactggcccacttgttgcaaattctactgaggaatttgaagcatggaagcgtatgatgaaggcatcctctggagaagctggagcaggtaatgttataacacccggcgtcacttccaccactggagccccttcaggaaaagcttcgctttctagagctgcctctaattcttcaacctctgctagagctggcattagtgttgattctctgtttggaaaacgctccgctgcccaagcgatggctactgtcgtaccctctgtcagtacacctggtggtacccctcctcgctttgcttctccggcccttacagttgaatccatggtacatgccgcacccagcacaaccacttcttcgaggtttagcaagttttttaacggactggctggccctgaaacttctaagacttctacaccaaatatgtcaaataacccatctcctcgagttgcaaataccgttgtttctcctgctcctattcctactataggttctgctacaattgacaaagacgccgaaggatttcaacgcgtcttagctatgcttggcagacaagcatcaagcacgacaggctctcctaaggttgctttgtcacaaatgcctcaagttaatgtcaacccttccaatcaagaccttgcctcggtaaagcaaccttctgggttttcacctccgtctgcagttgctcctcctcctggtttaggtaatcacaacttttctaatgatgattcttccttctttcgatctcttatgacttctgatactcgatcagtccctccgcctcccggcttttctacgaatgctcctaaagcagttaaatctccggaaatttcagcccctccaggtttgtaccgtggtctgtcctctggagcttctattccatcggcacccccaggtttcggatatcaacaaccatctttcccatattcccctggatttcctccatctgcttataatcaaaatcgaactggttatggatttccagatacttctagaccaccacattaaaaaacagtgtccttagcacgacggtgtgatgaagtttctcatttgactatagtagtgggtgtgtatgcatgtatgctctgcgcagttgttattccgtctgcaatgtcggtaaactccttaacatagactttgctttatgatttctgatataaaccggagacctttgaacgatttttccttgttttaggaatttttaatatgtgaattaattagtacatatggctttttttagaatctccttgtggttttcagaatatactgcaacatcgtcatttgatgaatggatactgcgtaaaatgggacagaaggatttttaattaaccgtttatgaagataatttttaggagtcgttaggtcagtttataaaataggattaatcggatgttttagttcatgagtctaaagtatgtgattaagatgagtattttggttatacgcagttttgggaacttgtgtcataccaaggtatagacaaaacagttcatgatagatagaactaaaaaaattccacttctcaaaagtattataaatgttaaagcatggatctgatcaattgtttggctagctgctggaattttggttgctgctaatctacagtcattggtttcccggcaatgttttactaaaatttttgtgaacatgtgtttttatggatgtgtgctctttaaaaaattacatcttttcgagaatcaatgtgttgaaaacttagttctttacgagaattctactctagccaaactgttatcttttggatatacgaactagagaaagcatctctaaatttttagacaaagtgatactgctagccgaaaaataatgaaaggttgtttttcacgtttatgtttgtaattaatgcgtactaatcaaatcacattttcctaatgtttagatgtgagattggggtttttgtaggaatatatattattttcttaattcatatttatttttttaataattggcttcactttgactaagcgtcataaaagagatggtattttcaaccgatagaataaaagagttgtttaaatgggaatatacatcgctagatcttttccagtatattttttacaaagtgcaaaactatcttcaaagtaatatgaaaacatataagtgataaggcgtattgcaaggattacaattatttttggacatttacacctatgaatttgggtaaatctatgtatgaatcaaacaaactatagacagcagagataaaggctctataaatgcacccacgtttactcctattaatcttataaaattttagcacagaattaattgtgtaaagtgataattaaggcaggattgaaagttgcgtttcgacaaaaaaaaatatatatttatatataagtgtgtataactcgtaaaccaagaatgttagatgcgatcacctttatccattatatataaatttgatttcacaaaaactcatatcatattgtaaacaattaaataaacacggtaagcatctttacaagttcacaaaaatcgttaaattgacttaagctttgtaatatatttttgtcgtttctacttttaggagaaacatactgaaactgacagaactctttaaggagcttcaaaatttttgcgaatctcgttttatcaaaatcggttgattctgcaattttgatttaagtggtacgctattctttgtagaactgtttacattttgatcaaacagaacgcgacccccaacaccgagatatatgcaagaatcatcccaggaggagcctgtgcactatgttcagtggttttacctatccaattacgacctctacgatgagacttcttctatggagttgactggggcgcagtcctggaggcggtttttgaactacgataataacgctttagaagcaaaatacaatgaaattattacagaggaggtgtctcaagagccaaatcagaagaatgtaactaattttttaatctatatgtgagcttaactaacgagcaggtcattgttggaatttctgggcttcatgtggtaaacttacctactcttactttaaagcctctatactggccaagtgccagtaaaaatgataccttacgagtcgttcgcggtctttggatgtacgaagatacgggtcttcctgtaatcaatgaattgtcggatatgttagaagagggctaccaggaagtgaagccatacgccgttaactgggataatgttttaaaagaagaagaagaagggaaggattctcaagatgatccttctgtattgtctcataaacgtaacaagtcctctaaggaattaattgatgcgatgcaatggcctcttaaacctacctcctctggcaaatatgtattttacgaagacggatatagagcactcatttgtcaaggaggtttgttatcctatttttcaaaagggactcaatctcgaaggaccagtattaaaggtatgccggtcgttcgagattttccttactttgaagatgatggttttaatggacctaaacaagttacagatctttttttggtggttcatggtatcggtcaaaaaagatcagagactggtaagtaaacttgatttttttttatcttacaccggcattcaattactaatgttgacaatatagaggaacgattcttatttaccaagacgtgcaacgtttttcgttcattgatccaaattcagaaaaacataatgaaagaggatccgttgattcgaaacgattatgaaccacaacttcttccgatatgttggagaaataagcttaattttaattcatatataaagccagttgccggtgatgaaggacgggttgaggatgaagaatttgaagaaaatcgattttcaattgaggatattgaaattgatagcattccagcggtgcgaaggttattaggagatgtgatgagtgatattccctattatatgtctcatcacaaagaatccattataaagtctgtaattcgtgaagctaatagggtttaccatttgtggaaggactgcaatccttactttttagaaaacaagggccgtatctttataattgggcattctttgggctccacagttgtttttgatattttgtcacttcaacccacttttgtcaaagaaattactatagacgatgatgaaagctgctttatattcgacacaaacggttttttttgttttggtggtccggtaggtttttttttgcatttgaatcaacaaagtattattcctcgtcgtggaagaggctcatcaagatacgaaataaataaaaactttataaattctgatgttccaaagtcatatacttacgatggttatgatcggtacggatgtctcgcagtcgactctttttataacatctataatcaccttgatcgtaagcgcatcattaaattatcgtatttactaacaaattagccgttgcgatgcgattaaatcccacagtggatctctcattttcgaaaggcatccacccaactcgtatactgttcacaagaaaatcttcaagtattttgagaatgatctcacattctaatactgatcctgtggaacttcgaagttacaatcaatctttgcagcaaaataaaaacaatgagcccacagcagtggtcccactggagcctgaacagactgtcgagttagagactcgcaattttcgcagagaagaaagggccaagtggcgcatgcaagagttgaatgaaaactctcagttggactacgtatttacgagtgcccatggggtcatttcaaacaaatatctttctatgctttcggctcatagcagttactggagtagtgaggatcttgcttgctttttagtagtggaaactggccgaaactttggtattgccaattcaattgagcaatttcgtggaaagcatatgccacgtatattcaaaggggacagctcttgaaaattttctttttattttatctgacagtataccagcgagcttcatatttattagcgatgcgaagtggacaaattaaaatgaatttgatgaacattggataatgatgattttttaggatcactttaatgactttatatattggcattcgaaagatggttttgcattcaatgaccagatacgaaaatttattagagtatttatagcaacactagtgattagctagttttttttttgtttttaatctattgctatttttccaaagcttgttaatacaaacgagtaattcgttttatttgtctctagattggttttaaaaagtgtctatacaagcagttaaagattacagaatgcttcaaagtgccccacctcgttgttattctatttaataaccgttttgacaaatataaaaaacttatatgcaacgtgactttggcaaagtgtgcgtttattctaggatccctcataggtaaatgtaaaaaacatgttcttcttctacgataaatatagtaatagtcatttctttcattttgagatttgaaaaccgaggcaaaaaaagggtattttgggtattcaagcttatttggaagaacgctcaccactcacgtttttttgaattcttcatacaatgagcggccatactgatgccgatgaaattcatgagattttacgaaatagtacgactggtttagtccatttaaaggattatcaaagagtaaaacaaaacatcgttgaaaaacgagagaaacatgcgctatcaaccacaagtactaaaatgtaagtgaaaagaacgagaaaagcccgatagtattctaaatatgactgacaattcaattttagaaaaaagagaaaagatgctttaagcaaaaaggtcaaacagggcattaaagttaacaaaggaaaactttcttttggtgaagatgaagaactggagaatgatgatctacctttaaaaaaagttgagaaaaaaatgtttatgggaaaggatccatctgcggatacctcctttttgccagatgcagagcgagaaatacgtgaaaacgcgaagcgagccgaatatcgcaaacaatggctaaaagagcaggagcaaattcgggaaaaagagattttgataccatttatctattacgatggaacaagtaccacttatcatgtaaggactagattgaaagattcggttggacactttcttgctgatatgaaacagcaaatcccatttttgaagaggattctggatatggataaatttttactggttcaatctgatttaatcattccccatcaccatgagctttactacttttacattaataaagttcaaggacgtgatggacttttatttgactttgataagctgtcatgctctagtccagaaatggttgcaactacacaacttccttctcaatgcattcctcatctagttcaaaaatcatattatttacaaaatcgccatgtgtttccatgtgtgcattgggaagtctttgattctcgaaaagattattcattggaaaagcatgcaactgatcctaacgctgcattattttaccggccctcataatgccttttaaaaagttttcgattttttttctcttggttctttatttttgttttgcatactcatacttccctcatcgactaatttaataacaatttcattacaactatattgtttttatgtttgtattttaaacaaatgaattgcgccaaacatataacttgataagctatacaaagagagagactttggtaaaaaagaaacagatattatccactaagtattcgcaatgggttttagtatttacacttactactctcaacatcactccaaccttgactgaaaaccttgatttcattgatgtgctataggatattgtaaaataaagtaattaaaaaattagcaattcgcttttggaattattaaatgtttcctttattattgaattctcatatttctgcttgtttttatttaatgtatcgcagcgttggtatgcaaatacatagtatttgatcataaacatattaacgatacgttaatttgcggtggattatactgtgctatttaggtatacaatttttggtaaagaaaaaagtgatcgtgactgaatgatgagaataactattctattgtaaataagaaatgaaattcgcttttcgttctcttggaagtataagcatgtcgcttttacgaatgttcacgagtctctaatcctttcggtatactgtaaacaatctagtatgtaacgtttcatccaccattttcaagttttagaattagaaaaccagtaatacaggaaatataagatgatacttttttctaaaacaaataaatatgaaaaatcgaccttgatgtaaaacgagaacctcttttaaacaatgcgatttcccaatatcctagtaattagcccatttctgttcaaaaaaatcaaatggaaaaaaataaagtactcaattgtattgaataaactatttcaccctccaaactagccaacattcagcccaagcaaaaagtaatgctttttcccatatccatatcgcttgtagctttacatgaaagattggcaattacgcagtttgcaaaatgcttttaaggatacgtcaagctgcgaaaaaattacgttcctactaagtccttatgtagttaataccgcagtataaagatgcgttatccatcattttttggttataattctacaagcggtgaactcaactaaacatcagaattgttcataagctaatatggaaagggataaaggcgtcgctccaattgttgtagaaaatgttgcatataatgaacaggtaagaaatgattgcagagctagattttcttggtactagtttttttaaggattttataattgagtgctaatgaatccaaaggtcgtttcttttgttcgaaacttgacttctagttttttcgggtgcgcagctggtattttgggtttaacttcatatgaagggcttgctctgtatgtactcggttacttcttcgtctcctttctactctttgcattgaaaatgcgtggtaacttaactaagtattaccagcccggatataagttttggatcgctaaaatattagatggcgcaccttcttatgttttaacttggacattgttctacagtttagtatatggtaagaaacttgctcgatcgttgctattttattttgtttgaatagtcagatctcgcattgaaacaattacacgctaactaagtcattagtttatgagtaatgtgtttaatttgatttatgcatttggcaattaatccaagatgaaccctccttattcttgttcagccctttcgttaataacacatatacctcattaagatctattgtttgagaaaaaagtggatctcttccttttgttcgtgaacccatcctataaatattttgtatttcctaataaaacacaaatctaactgtttttttacatttctttacttttcctatagaaaataggatatttgtttaaaatatatttgtcctgtcagcgatgctagaacatagcacacacattccgttgtattcatgtcgtcttccttaaatttgatttcgaaaactttgcatgagatatgttctacttctttaagaaattgtctctagtgcttaaaaactagctgcttcagggcacatggatgcctaggcatttattttttgaacacgtgttttaccattattatacagttgaagtaaacactgcatatattcaatatttgcaacaactttgacaacggttgaaaaggacaaaatatcatattcaaacacgatctttgaaaattttgagactaatgaattgtattgtattatctaaacttactaaaaaatgaaaaccaaattcaaagatgcgacaattttacatttattttcaaaattgtagagatatttttaatctaccacagtagatttcccctatttaccatataaataactcataaacaagctaacctcacaaagacaataataataatataataaccaaagaaagaaaaaaaaaatcaccaacaatcataaagttgagctgataaaaaagggactgactattaaatagaggagattatagtaagaaattgaaatgtccctaataatcaaagaataaagtattttttaacataaaaaaagtctgaaaagaaaactaagttacaccgtcaacgattaagagattagctcattaacaagccaccacattattcattttttggtatcgtttaacagatcaccaatatccaaggcgactttgtaaacaaacgtgggaaagacaatataagtttttaatgctttgcaggtggagcaggtgactcttctgaagccaccaaattatggacatgtgttggagaatgaataactttaccattttccatatggcacatcgaaatatcattaatccaattgtctgcaaagaccctgtgaatgtcgtaacgcttaacaggatccaactccaacatatgagctataacagcacgagtttctcttggtagtaggcgcaaaagtctccagggtccatacaactcttgtttatgagttgaagagttatcagttttagagtttggactatgtgattcatcggtttttctaataggttcgcatccttgctcgactaagcgctgtttttttatgtcagcaagtatatcactgggagactcagcatcatttgaaggctgtttcatacaaaacaaacggaaagaattgtctgaaagcttgggatatttccaaggaaagcggcgaagagccatacaacagaaaataatggcggaggaccagatatccactgcacgaggatcatatagtttccggaccaaggtttctggtgcaaggtatggatccgaaccgacaacaccagtggcctcaacgatatcggcttcaaaggggtatttgaaaacgacagcgctaccaaaatcaatgattttaacaaagcaattactatccacaaccaaattatcgagtttcaagtctcgatgcgccaaacccatcgaatgtaaataggcaacacctgagagaagttgtttgaaacaacaataaacttcaggcattgtcatcttaccactcattacgatggaaaacatatcgtatggagcatattccataacttcatagaattttttattttcctcaacaatatcaagggtctcaataatattggtatggtgcaaagcactaccaatacaaaactcagcagtaacctttctggcatattcacgctcggtttcagtaggccttcttgcacggaattctttgacggcgaaaattttaccatcagaagatcgcttcataatacggacagaaccgcctgcaccagagccaagcattcttccaaattttccgtattttttgaaaagaccgaaatgatcatcttggaggttagcggaagattttgacttggaaacagatggctttttctccttgtctgtcttttgatgggatttgaaaaagcgacgaagatctaaagaactatgatgtttttcgtgcttgtcatgcttatcatgcttgtcatgatgattaggaacaagagatttcaacgataaactaccagagtgtccatgatgaccatgctttccatgatgaagacccaactttctgaaaatgaactgtgaagggatatcatgtggatttgtcttaataggagcacggcgggtgcgtcgataaggatcgttgggatcgccgacaaggtcttctgaagaagggtatgcctgaaaaatgggggagcgatgatgctgagtgttaaaagagccttcatcagattcgccttcaccaccactgccgctgttttgtgaaagagcaggagaggtgtaaccagtcgaacctgaaggtttaggactagcagcatgtaaagcattttcagtacgagggggaaggacggtagaagaattagcagagccatgataatcatcttcatcctcagaggtgatagcggaagggggaatggaaataggttcgaagtgacgtgcagcagatgaacgataacgatcctcggcaagtttagggtcaatgtgattctttatatggacgggggattgaactctgggaagaggatgattcatatcatcgtccgtatcagcgtgctcagaaaagtcgacaggatgcaaacgctgaggagggttacgaggaggactcgttatttttaattcagtgtcaagtttattttccagtgaggaactggaattgtctgatttatgatcgctatccccattaaggttaaactgtacattgggaggggtgacagacatgttcgtaacggcaatcatgtgcaattgtaaaataaagaaacaaaagaaatattctagttcactgaagagcaaaccaccggtaagattagagaaaaaagtgttttacaatgaaccaaacaacaagtggaaggtttggtaaaaaggtaaaaaacagggaagaaaaaagacagaaaacttcagaatacaacaaggaaaatacaaaagagaaacttgaatgaactcaaaggaatgtagttgttaaactatttaacaatacaagttttcaagtacgacacaaaacaattgcgtaagaaagtacgattcaaagaggcaatctcaagacggagtgaatgggaacacaagaaataaacaaacacgtcaaagagaaagtagagaaaaatcaaagatttttgacagatattagtttgtaacggagatactgtcagacgagatgggaaattgaggaaatgtcaagcgagttttttttaaaacaacggatgacaagggaagaatgaataaataaatatataaataaataaattccaagtaagaaaagggttgaagagagaaaagaaataagtatttcctaagaagataacttttttttgatgggaaatcgagcgctgacaacaacgaattggttattgtttatggaaaattctttggcgcaacgacaaaggaatgagagatttcaagaacaaaaaaaaaaggaaataaggaagagggaaaaaaaacaatactggaattaattgggaatggggaacctttttataggtatatcagtagatattttccaaagggagaaattcaaggtaaagtgagccgacgagacgatccgatcgatcacgacacacaaagaggaaaaaaaagaggctttaagaaaagcacacaaaggaaataaaaaaaaagagaagataaagaaaaagtgtgaaaaccttgggttcaaataaagtatgaaaaatgagaaatgaattgagattacgaaacaggaaattctatgtattcatagaaaatagaacgtacgtaaaaacaaaacaaaacaaaaaaaacaacaacaaagaacaaatcaacccaaaaagggaattcgaaagaatgttgattgaaggaagaataccaagggggaaagagaatcacacaattcactcactcactcactttcgggataccgatcacaccaaataacgaaacggaagaagccggaaagaagggagtggaataggaagggtgaagggacgaatggcaaattgagtagaaagaattcgactcaatgaggatggatggatggatggaaaattaagggaattggaaaaaagcgtaaatgaatagaaaagttggaaattgatttgttgtttttcagaagaaatcacaacaataacaacaatgttttgatgggaaataagatctttatgctttattcaatctttattttttcgtttactttctcaaaattctttcaattcctgttttacccagaaaagaaatcaaaggcagatagaccaaagggaatcaaagcaatgcaatggacaaaaaaaactttcgtttttcgtatcgtatcgtatggtttgatttgcttttgcttttgctttgttgagtcaaagttgttggactatgactgacgggggagtgaagtagagctttttagtataattcaaatcttacaatgaatttttttatttgctagtttaaaaaaaaaaaaaaaagacgacgagaaacaggttcaattccttgataaaaaggaatcaatcaatgtggctctcaacaatactatgaaaaaaagtggatgggaaaaggcaaaaagtattgcggtgcacggcaggtgtatataatatatgtatacgaaacacgcagtctactacagcatctcccatgtaatctcgaatggccgctctacatcaactgccgagtcgcattggatggaggagctagcaaatccacacgatctccgggaatcccacccatgcaagtgccgaagtatgatgtcacttttagttcggctacaacgtgttacctccggcgagcgactccacaatccgttgcaccgcgctaaacgctgagaggaagaacgaaaggctaaacgctagcaagcaggggggatgacgtgggggagggcgaaagggagttgagtgagcgagacaggcggtgtgtggggcgagagaggggagtagaggggaatagcgaagaggaacgcgacctcgttggggagaaggagagcgaaagaaggtagatggggggcgattgagagtcgaaggaggaattgagatgggatgaaagggagaggttaaagatgaataacgtataaaaaaagagattgttataagagatagagagatggagagagctaaagaaaaaattaaagaggtggaagagtagctagagctaaagtgttgaaattagctaaagtatgaaattcactagagtgtgggaaatgtagataagtaaatgatgattgacatgtttcattcaatactttgtatcatcatttgtcaggaaattaattccgttgatgttatcatttcatccatctgccatggtcattgcttcgtgcgaccgccagtcgcttccttttccattgaatttggatccgaccgtttggtggaaatttggcagaggatcaatcggaaggaatgatcgggtttattaaagttgaaggaaagaagggaaaaaaagttaaacacaaaataaagtaaggaggaggaggaggaggaggatgaaaaaaagaaaagaaaatttcagcaacccaaatctaaacaaggggagggggaaaaaaagagcggcagtaagcaagaggaatgggaatttaattaaagaggaatagtgatttgattaaagaggaatagtgatttgattaaagaggaataataatttgattataagaagaataataatttggttcaattcaattcagtttgattcaactcttgttgcttctcacttgcctttctctctcctgtttattgcacacactattcctcgtttgtcatctcgcccatccagcatcctgacaatgacactagtacgagggaaagacattggagcatttctagagcaaaagcaaaagcaaatgcaattacaattacaattacaattttattttatttttatttttattattattttattttattttatttcgtttaatttaatttaatttaatttaatttaattcgattttatttattttcttttaatttttcctttgtttccttttctttcacggccgccctacaaaattttcttcttcctcatccaaacagtcagacggccgaacacaaaacaagagcaaatgctagatgctcatgaaaaagtaaaactaaactcgattgacttttgagactatatgcacatcagcctttccttttgtttgtttttttgttttttttattcttttgttttgtttttcttctctttacttttcttaccagccctaaaattctgtgggtttgtgatatcactatatttcgttataccactcttttaatgacatctgtatatctcgttatcttcatcttttcagtgacttcgctgtacctctttatatccctttgctacttgtttagttagttggtctagttttttgtagcattcgttattagtaagatccttttgtggctttgtttgtactttgctttgaatcgaacggtttttccttttattttttattttttattttttattcgctggctatattgcttcaaaccatttcttacattcgaatggtttttttgttttttaagcataaaaacatataacattcactctttgactagaattcaaaacaattgccaacatctttttgatttttcttctttttcttttccaatccatcaatgtttctatcaatgtcttacaattctctctctatccatctttcatctcatctttttcttcctcttattacagacagacaccttcttcgctcactctttcctactctctctctctctcttcctttggccgctccacgtttcattccatttaccggccttccttatttctcggtaatggtttttccgatcgtcacggtattgctcttgtctctttctttacccaccttggcgcgccctcggcacttgacttgacttgattgccgacaaagtcaaggtgtaacataatggatctgccccatcaaactttttccttcctccaatcgttggccttaaatttacttttcttccaataagcttttcatctgcgtttaaacatttttgcttcggttgatgcatctgacgtgcttgggtaacaccttttgctcgttggaagattttgcacttggttttcaatttccgctatacttttgttaccggtctttatcatacttgcactatacaatattatcgcaaatatttaacgtctcgttggtttcgccgaaggaccgccccgcggctgtctcggttcactctccaacagtactccagactgtggtaacgtgtttgtatgcagcgtagaaggatttgtttataagatttcaatcttttttctttttcttttttttttcttggttttagaatttttatttttatatatttattgattaattgatttacttattgatagattggttggttcattttttttctttcatctttttccaatctatatgtatgtgtatataaatattttttattttattatttattttttatttatttatttttttcatttccctctatttattcactccggatcacttccatccttatgttattttaaaaaaaaattttttttttcttgttctatacttctgtttattttcatgtccttttcatttcgttcaattaatttcattccatttccttttctaatattttttttcctttgcgatcgctaccttttccatacatatcttgttttttcctccatagtatccaccttgtaaaacaaaattcaattaaattgaaaaattaatatttttaacaaatttttgaaaagttcgaaactgctgatttacaattttcatccattctttgctttccattttctccatttctcctctacttgcgacacttggaaatccatgtataaccgagtttaaggttatttaataagcgaatgtgtagttttattaatacaaagattgttgcgctcttataatcaactatttgcataaaattcatctcttttattttttaatttatcataatctaaataatgaaacccctcaacatgtctgaggactcctcctgattgcgaaaaaaacacccattcaccaatacaccaatttagaaccggttttctaatgtttttctattaataatcaaatcatcctcataaagttcttccttcaagctcaccattttttattttttcaagtattcattcattccaaattttgctttttcaatccatccaaacctgtaaagccgaaaccgttcctgtccaaagatccttctctttactttcatcctcttcttcactttcatccttctcatacttgtaaattctatttccataacatacacactttatctgcatgtttatagggttcgcttgtactgtgtttaccgtcaaatcgtaatttcccgtcacatgcgtttcttccacaagatccttgtttctccatctacgaatacttccatccgtcccacctgccaaaatttcatcctttttatcagtgtcgaaaagaatcctttggttcgtatcgccacgatgcccttcaagagcatataccatgtcgcgcacataccgtatatcccaaacttcaatcttatcactgcatctgcttccaacatataacttttctccatcctcacaccattgtagatgtgtcactccgtttcctctttcaatcgaaaactctagctgacaagggcgacgtccgcaatcattataaatcccaactcgatttgaatacgttcccactgccaatgttttcgaatccatcggattcaaggaaaagcatgactgtatacccttaagactaaattcccaaagagggactttatatccatgggttaccgttgtcatgacaggttctttacatcccgttcttatattaaaatgatggagacagtttttatcacccgcaatcaaatactccccatcgttggtaaactgtaaacaatgcgatccttgatatctctcttggtgatctatcatgtgatatgaagccttgttctttcctgtagtaaaattgatcaacttgataggttgatccctactagacactgcaaaaaggttactggaaggatcgtcaagtttcattctcgaataccaactgtaactgtaaactgtttccggtgattgatatttatacgacagatgttttgaaaagttcaatggtccatcagcctttttggataaatcggaaaacggcacattccaacagttaagacattgatcctctgttaacgaaagtatagtcgatccatccggcgaccatcttgacgaatgaaaaaaattcaatggctttgttggactttgagcaatcacatttgttcctaaattaatacttccgcatacatagccgaaattttgacttttcttcttatgcaccaagtcatccttctgatcctcaaaggagtttacacaattatccattccttcctcaagttaacctactttattaaccatgtatggattatggctcttcacaatgtcaactttaattttttaaatatataatatatatatggatttctttctatctggtcataagggttgaaaacgaatagtccttctttaaaaaacgaattgtaatcatatgtagtagttgtaatctcagtatgctcgaattactccaagacatttccacgagtcctaaaacagaaagaatgtattctttgtttctcaatcataaaaaaaaaagaaaattaaaagttacgactcaggttactatataaataaaaatagagacaggttgcgatatacttgtctaactaaaaaaacaattgagtacaatatcgtcaacatttttattactttacgcccattgaaactataaatatatgaacgaaattaagcaaataagccttcatcgtttttttgtattgataaatcaaaaaatatattaatgaattaacgaaaataacctatgccaaaatcttaatttttttttatcaatgagtgcagacgcgtacaaaaactgctcaacagttcataaactttagagtgtgtcactcttttttttcttcagctatttactacaaaagttggcttacgcagcggcttccgaaattgtagcagtttctgaaatggttgcagaaattggtttagatgtttgtgtctttttcttcctgtgaaatcttgtatcctctggactgaatccaccgttcccaaacatggcaaaatcgggcgtggatgccatataatcgaatggaccaaagtctttctttgtccgtattaattcgaaaaactttggataatcaatgtgagtatgccaatggccatcttttttgaacgcagtttgagcaactaaaatactgcagctgtgtgcatgttctgcagcaatttcatagcggacgccaaggtcttgtaaatgaatatcaatatactcaatcaattttttaacaaagtcaattacctcttcataataaggcacattcttcatagtcaacggtgattgatccgaattaccactataagtaacccccttaacttcgatgaaacaaggcacaccaagacgaatcagttcagtatactctttaatttgctccatgttgaatcccttcaccaaggtcattcggtaaacagtacgctgccgcttttcacgtaaaatctccaaacacgttagcattcgctcccaaaaatccttgaataatggtcggtctactgatttgagactctgcttagtactggcatcaacagaaacgtagagttgagtgaccatacccatatttcttaatgcttcaggatgctgggcatttgttactaagaacgatgaaatctctctttcatgaagcatggacacaaattcgtttatgtatggataaaatataggctctccaaccaaggacaaagcacagtgacgaacacgagacgcttcttcatatctgtcgggtagaacaccaggtacacctttcattaattttaacttggcataatgagccttcaatataccctgaagtatcatttctggaggatcaaccttccagcgccaagaggttcctacgggattcgtaccatgtctccaacaaaaagtacatttattagcacaggctaaacttggggtagcttccatacatagatgacttcgaattccatagaaactatacttatagcaaaagcctcggccacgcatagcagactttgtccatctgcaaatctttacaccactatgtgagccaactacgctgtatccctgctttgtaagggctttatacgtaggagactctgtcgaaaccatctctttagtacccactggcaaggctgcttctgcctttgccttggccatcatggaacccatatcctcaacatccataacatccgaactaagtgaatccgtgtttccgattttcaaaagcgtaccgtttttcaagcattctgctacagaccttgtccactgtaataaagcgtcaatttgagcagtaggtgccaattgtgtgtttaccacgcccaagggagcaagcctacgagccccaagttttttgatccatttatcggcttggatggcctgatagcaaaatttgtctccaggataattttccatatcacccaatccaaaaacggcatagcccgatagaccatgcaaaggatctttaggaacacgaaagtcagaaaacgactcttgcaaacttgacaggtaataatcgatgctagattcaatttcataagaaggaagcacaacgaggtagatggcattttctggacaagaaacgaaatactcagaaaggtctacataatccaaattcaataattggatatcatctctttgaagcaagctgcttaattcttcatgaacctgtttggcataacgttcagcagtacctcctaaagtcgaataaaagacacaaagaggagagtttttccaatcaatagtatcattttgtttacgaatggaagaggatggcgaaccgatctttccccttttgccaacccgcttaaaccttttaacttctctctgtttctttacctcatcttttttctcgcttgatttatctgaattggacaattgggtttttcgtcgaatcagaaaatggatcagtacaggcagcagcaagactatgtacaatacagcccggtattcttcccaatgctccccgatgtaccccaaagaataccccatggcaatgatttaccactggaatttagcaaagaaatagtatccttggtggttggaaaaaggattctttgaggtgtggcatatggaaaagacacaggcaaatttcaccaataagcgccaacagaactaagtccagctagagagtactaaaatgaaggatgaacttttaaattaatttaaaatttttacttatttgtttattttatgattaattttaccttattaatatataagtgctttcatctaaatgatggagtgctggccaaaaaggtactttttgtaaaagtcaacattcttgaaaatcaaactataagaaaagcaatatctcttaaaatacctcatgtgtagtaacatttagaaaaattgctagatagctagtgttagacgtagtgaaaatgatacttggagatgagacactttcaaacgattgaagaaagaatcaaggatgagggctttgtaatgattgttatttgtgaaaagtattcaaaaaagatttggaatgtttgatgagagttcatttttaaagattttacgacatgggaatatatcagtaaaacgaagaataaaaagtaaataatgcagctagcatgctgcgtcttaaataaagagcaaaaaaaaagatataaagcaaaagcgataaatgaagaaagtaagagaaagaaaccaattcaactatacctttgtaacatcgaaattctccaagcttagcacctttgttatatgcttgtccgcagcttgttctggagaaagagaaaaaaagggaagaatattgacatcaggaacccacacaactttcatgcctgccgcccggcctgattgaactcctgtaatggaatcttcaaaaaccaagcagttctctggcaggatttctgcctggccttgagccttgcgcttgtcgttgatcatcttcaaagcgatgaaccaaatatctgggtgaggtttgcctctaccgacgggtaatcgagggtcatctccagtgataatgtttccatcaaaatgatcaaacaaatgactcaaatgagcggacttcttttcaaagttgtgtgtgtcactggaagtggctagtgctataggaatgtttagtgatttcaacttacttaacaaattcataacgccaggtaaaggctttgtatgcctccatagttcagcttgagtttcacgttgtaatgctatgtattcttcgcaggtcaaatcaatacccgaccaatccaaaaagattctgctggcctcctttgaagttcggcctaaagcatgaatgattagaaggttgaaaaaaacaacaacagctcaaagccacttacccatcatcttagccttgacttccatggagaaggggcctttgttatagcgctttaaaatgatatctagacgcaccgttagcctaaccaatacctttgaacagaaagggaaaaggaagagtaaaacttactagtgctttttgtgtagattgactctgtatcgaccaacaagccctgtattcgttagatagaaggacactttatcgcttttcaagtagtatgctttaaggaatcatcaggctaagcacttttaagtagaatgaaaaacaaataaacgataataaatattgtatttgttgatcatggacgccgtaaatgatccatattattttactatgtacgtacgtccatatcgaaaagacacgcctcaggaatcatctttaaagtaaagtaagggttttaataaaaagaatgtctttgtttttctacgatgaagaaagatattgttgaaaggatatatactattcgtaacagaatgaaaccaatttcgatcagtatacggacgaaagcagcaatgggaatgagatgaatatacgataacttatcaaataattcaagtttagacaatcacagtcgtccttaataaattctgctagaagtagtcaaacgtggagttgacaagttgcaagacgagccattgtttaggcaaaggtgagaaatagaatatttgtggcattaggaaagcttttggacttgcaaatagaattgcttgaaaataatgagtgtaaagagaggtaaagttggcgaatttgttgagtcagggattgaacttgattcatctaaatgataatgttatggtaagataaaaagaaactagaaaaaaatagaagaaagtttataaagtgcaatgacattgaatttactcgactctcttcctattacacgacaagctcagtttatggatgtttatttgtctacaaacaattcattcacgtgtgactttgaacttgaccggaaacatgttacagaaggtggtttgaaagtaaaattgatacgggaatgggtgtcttattgaaaaactacaaagctgtactcgatgactatggaatgtcatcaggtggatatacagatagctctttttaaatgtcgagtgagatatcggtggtttattttgaagaaaattacttaaaaagtgattaaagtaataataagtaatgaaagtcaaataaaaggccttacgattatctgctcgtcaactatgggtatacaggtgtatctcacactatgcttgaagatttcgctgacgattatatagacaatgtccataaacaggttaaaaccaagcctttttaattacgaacttgaccatttctgaagactgtagataccttagaagctaatctcatttgtattactgtaagaggcaattcgaatcgacaagagtgtaggtagaagagtatacctatccaaagagtatcagatgcttttaccaatttaagagttttccatggatatgtattcaattttaggtccaactatttaacacttgtgcgaacatcgatcatgtccgatgcagcaacttgctgctgtcatgtcgctcaaaccaaacaaaagaaatgtgccaattaacaaaatatttccaatactatacttgtaacgttctagcattaatacataccttaaggcactacttgcaatcagcccagtcatgtcaatctcttcaatatcttgttcgggatcccgcttgcgaccagcgcattatttttcttagattactgacattatatatttcaatttggaacaaaaaaacaatctgatttcgaccattttttaaaatttttctttttcataaattttttcgacttttcctatactttcgatggtgaagaatgcattgagcacagtctgcagcttccatttttttcttctgaaattttatagtaaaatcgaaagtttttcatctgcttaagcaatcaattaaatctagacaaacattgctaagttctccgcaaattcaaagaaactttggctgacgtacctaaaatgcttaagtggaagtttccacgctacacacaacttaaccagaacctatatccttaggaacaccaagaaactcagaaaaggtatgtttgtagtgttttttaggaaaaacgaagttatttgtctggaaaaagtatttactaacgagtttttgaggtagttttatcaaaatgtcttcattggaacaattaaaggccactggcactgttgtcgtctccgatactggagattttgaatcgatcgccaaatacaaaccccaagatgccaccacaaacccttctctcatcttggccgcttctaagaagccccaatatgctgctctcgtcgacgctgctgttgactatgccaaggcaaagggtggttccatcaactctcaaattgagattgcttttgatcgtcttttgatcgaattcggtaccaagatcctcgctatcgtccctggccgtgtctccaccgaagttgatgctcgttactcttttgacacccaaactactatcgagaaggctcgtcacctcatcaagttgtacgaagccgagggcattggtcgtgagcgtgttctcatcaagattgcctccacctatgagggtatccaagctgctaagcaactcgaggaagagggcatccactgcaacttgactctcttgttctcttttgtccaagctgttgcttgcgccgaggctaacgttaccttgatttctcctttcgtcggtcgtattctcgatttctacaaggctaagaataaccgtgactataccgctcaagaagaccccggtgtcgtcagtgtctctaacatcttcaactactacaaaaaattcggttacaagaccattgtcatgggtgcttctttccgtaacgtcggtgagatcaaggaactcgctggtgttgactttttgaccatctcccccgcccttcttgagcagctcaacaacagcaccgacgctgtccccaagaagcttgatgcctccaaggcttccagcctcaatttggagaaggtttcctaccttactgatgagcccaagttccgtttcgactttaacaacgacgaaatggctgtagtcaagttgtccactggtatcgctgcctttgccaaggatgctgatactcttcgtaccatcttgaaggctaagcttgaggcctaaatattttagctgcaaccagttaggtataccgatttctttcattttgttaggagttttttagcttacttttttttaccctttttactgctagcattccgtatgttgaggtttccagattatgattttaaggatgttatggcagtcttttttaacaaaacacaaaaaataaatcgtacttgcgagctataagtgtgactaagcctttaggtttgacgattgttatataaatgaatatatatattttgtatatatgtattgcgtatgtggatggacatatttacttgtattttggaataaaatatatgatggatctcaactgcaaatggtagaatgtggaattaattattagcaaacacatttcaaaactatttaagtatgtaattggaagagcgtaaaaatttcgttaatattaattagtatattacttccgtaacataagaaattcactttgaaaagaaggatcccataaaattgggatgaagattgaatagaaaataaaaatatcgtaaagatagaagaaaaagaaaattatatcctgctgtgaaataagttatataatgagaggagtgattgtttaaactaaaatagtttgtacgtccagcatcaacttacggtcttcaggaggccattccaagcgtttccaagtacgaactgcgcgctcaaccgggtccaactcaaaaacccttgcacgacgaacgtagccaccatgtcctccatatccgccaaacccagcacctccagcaaagcaaaagtatgtgttataatctggatggattccacagaaatcatttacatggtcatgtcctgcaatagcaagaggaatacgtaaacttttcaaagctttcgcagtatttggatcacaaatggaataagaacagggctctcgaaatgcaccaacaaggtcttcagtctcgcaaaactccttcagagggatatgcaatacagccatttgaatgggctcgtacttgaaatccgcaactttactagaaagccactccagttgatcctcggtaatagcatcgtatccagggcataatcttcgatttgaagtatctccctttgtatctaaaacgtaaatggcaaactttcggggactatgtaaaacaaagttaccaacaccagagacatttccaatcaaacccatactaccaggaatctgactcaaaattttggcaagctcttccctcgataaatctcccaaatcatcgtgatttccgaaatttacagcaaatgggacgttgtaatcaacaaaaggggacaccgctttcatcaaagagcttctagcgtcgcgtgacgtgtcgccgttaattaagtccccagtcaaaaggacaaagtccggttcctctaactgtaataattcattcacgaaagcagtagtttttgcatcggccatacaatcctctgcagtctcatacggataaggatcgcgacacggtctgtcagaatttgaatagtgcaaatcagaaagctgaagaatcttaattgtctttttttcttcgtcatcataagtaagggttacggatgaaagctcctttctcttaagcgcttcaatagatggcgtcggaggagtttcacaaggtctttgcgtcaataggaccggctgtcctaaataaataaagtcatttagaacagcagaccaaccctctcgtaattcaacaacatcctcacccaacaatgtattaaattcgcaaatatcaccatccgttccataacgaatttgaataccgtgcttgttacgcttttccagctgtcgatcaacatatacctgttcaactaagacagtctccccaggaatatacagtgctggtcgtttcacgtaaaggtaggcacgcttccaaggaattcgggaacggtacagattccgactagtacgggcccatttccaaaattccaaaacgggacgacaaaagggagaaaaggaaaagcactcgaccagccttatatcttcgattggagtgttcagtgagaagggtcccgactttgagtcagtgatttcaatggtgttgagcgaataatcaacagtcaataatgctatgaaagccgcaactatgaagattgcccttttacgaaggaaatgaataatgtttctctttggtagcatcattttgcttagtctttgaacacgagattagtaattgtaggaatgtatttttaaccgaaaaacgtcccgcgagaactttttcttttacggatcaaatatttgacaaagaaaagcaatatttatataacaaatgtgcttcaaattaaaagtttttatgaaaaacctgtagaattgactgaattcatgaaagcaaaaggattatgtggatattacggtaatgtttacatggtagaagaaggcttttcaaattaagattcgaatgcggagcacaagaacgaatccgttatctatgcctagcgtagtgcagaatactcacttaagaatcgctttcaagaaacttgcttatcataatacttgaagttggaaagagctcggtatgtgaagagatgagcttaacgtagtttagcaggttctcagttattctgaatgtctattaaaattcagcattatagcgacttttcttgtgagtgaaaacaaacgttaaagctagatggcatttcggaagaagaaaattgcatggataagctctcagatactcattgacattaatattttcatctcacttattttttaatttctagcggtgagtgtttatatgagaggtacggcagctctcaaaatcttaacaaccattttggattatattttaagctctaactttttgttaagtattattttctgagaaattctgcttcatactgtagtggtacgagaaaactcgcaaatgaaaacgaatatttcaaggtactataaatctcgcttaattcaagcttaatttggccgacatttcacatgttgtggcccatgaaacatgtgtcaatagttgtataactgtgtaagggtactattgcgttagtttcttacctgatctgaaaagttttaagctgccagcaagtcgatatatatagagggttttgcggatcttgtttttttccggcataattattgtgccgaaccactaagccgaaccaaagagtaattatcataacgcaaactctttcaaaataaagaacccatttattcttcaactcaaagttcaagcagaataccttgaagcttgataattaacaaatttccaagctgagactcattcttcgtttaactaatctcacatgatgttttcctcattattttggttttgcatatttttttgaaaactcattaagtgtaagctacgcagtttggtatctgatttaaggatacgtagaactgcggtgagttttccttgtgatctattatattacgatacacaggttgtataagtagcaactgagtataggtattgtattaactgggttataatgttacctatcactaatatagctcataactgaactgaggaacgaggttcagcagtagctctatttatagtattcagataatattgatcttaatagattatcattaagatcaatctccatatcgtatcatacatggtacgatatataattagaacatgtgacatatagtgatactcaacgtagtgtattatagcgtagtgtagtattgctgacattgccctccccaagattttctatgtaaatctgaggataagtcatatgttctcagatatttagattattgtttttaatataatcattgacaattgctttgtccgcttgtagcgctgtagctaatgtagtccatcctgacataatagtactcggatttagattcgaaatgtacttgacatttaagtagagtacttgttctctgtttttatgttctaggatatgaagaattgttccaatatcagactcatcaatggtagcgtaattgagttctgaattatgtcgatacttttctaggtgagaaacatgaaaagtagatgaaaacatgtgcttgattgaatctggaagatccaattcatagttgtttggacccgacttctgtaacacatagaacggtcctgcaaaactaggtgctaatttattggatttatgaagaaaacctgttttcgttcttttgaccataactaggtctccaggttgaaattcttcaatttcttgtattttcatatcgaaatactttttcatctttatgttgtttgtattcaagtgttctttaactgtttgaaatacttggatcgtttcctgagagttttcgtcagttttgtcactaaagctaggtaactctaaaggtgataaagctggtgaatagcgatgtactatctcaaaaggtgtcatttgagttgctgaatgtatcgcattgttgtaagattgttgcactagggatatatgatctacccatgtatttggatgtgtgctacatacacatcttagtaatttctccacagtttggtttgtacgctcagtttgtccatcagtttgtggtctgtatggtaacgaaaatttcataacgaaattatatttatgtgcgaaatctttccacgtttgggaagtaaaaatatgatcattatctgcaatgatttcttttggattgccgaaataagcaataactcgttgatcaaacattcgagctgtttgctctgctgtaatggatttcgtacaaggtactaagattgccatttttgaaaatcggtcaactaccacgaaaagtgcattataaccagatgattctggtaaagctgtaataaaatccattgataaagattcccaaggtctttctgatgggggaattggttgtaaaggtccataaggtttatgattcctagatttgtttatttgacatgtatggcagttctgtacatattcttgtatttgttttcttattcctttccacgtaaatctacgtaatataatgtttgtaagaagttcaatgcctggatgaatcaatttaccttcttcatgatactttttaataattgtcctagtcagctgagtatcattaggtaataagatttggtctttactgttaattagtaagccatctttgagttggatattctcttccactcgtttgtcttcattgtttagtaaattcaacaattttgtatcattcgtatattctgtaaccacttggtttttaaaatcatcggttatcgagatttgattaacaaagttgatactattgtcttctgaatcttttggaattggttctgtttcgtcaacaattctggataaggcatcagctatgtgatttgctgatccaggtctgtagttaatttcaaagttgaagtcttgtaaaaataattgccaacgagctaaacgtttgttttcaggctcggattcgttagtaatgcgaccaattaagtttcgatggtctgttaaaattttgaaaggttcgatagtggattctaaatagtgtctccaatgtttgagagacttaatgattgcaagcatttctttgtccgatacgctataatttaattgtgctttagacatctttgctgaatagtatccaacaggatagtatttatcatcatcatgtttttgagacaatacggctcctacagcgacatctgaagcatcagtttccagtagaatctttttactgaaatcaaagtgtcgtagcaccggaggagaaactaaacattgtttaatgttttctatcgcttgggtttgtgttggtgtccatttccagcgtacatcctttttcaaaagattattgagtggatgtgttaattgtgatgtctttggaatgaatttcctaagataattgacagaacctagaaattgtcgtaattctttacgattcttaggttgcttccattgtaagactttgtctatattttcttgacaaggcgtaaatcctttttccgaaatgtgataccctataaattttacttgtgattggtgaaattcacattttgcttgattgataattaagttcgcatttttcaatttctgtagaacgtctttaacatgttttacatgttcagattccgattttgaatgaattaaaatatcatccatataacatactacatgtgattctttggcttcaccaagtattgtattgataaagtattgaaaatgtgctggagctgtagatatgccataaggcattactagatattcaaaaactccacgaggacagcgaaaagcaagtttatgttcatctccttttcttactcgtatcaagtgataggcacttttgaggtcaagtttagtaaaaattgtagaaccttgtattttagcaagtaattgttcaataagtggtaacggatatatattgggtttgacatacttatttaaaggtttgtagtcaaccaccattctcaaggtgccttcctttttcggaacgaacattactggacaggcgttaatggctttagattctcgtataattccactttttaatccttgattaatttcatcattcatagcttgcatttttcccggtggtagcgggtaatttctgataggtaatctgtagttttcttgagttagttcaacttcaaattctaacccttttattggctttggtagcttttccgtattggtttctgcagtaatgtctttgaattctttatagatatctggtaactcaggttccttgacaatatttgaaactttgttcatttgagagagcgtgtgtttactgctagatatttcaatgttattgtcatataatgttgtgaaggagatagcagctggatgcgaaaatttctttacaaccaagaattctgttttgattgatattccatttagacttatgttaagttttattgttttgcgattaatcttatttggataaactccaccatatatcacactttttgaccagggtctggtaggcagtttatgtgctcgaacagtttcttctgttataatatttgcttgagcgcccgtatcgattagacagggtattgagcacttgaagtctggaagttcagcttgtaataccatttcgtaacgtttcctagtatgatttaggaatttgttagatgagtattctattctcgaaacatttgtcttcctcaggtttctgctattagtggtgttatttttctttgaaagggactcttttcctagatttttattttgcggttgaaaacgcttgtgagttttaccatacgaggctgttcttttgtcctctaaaaagtcataaatttcactgatttctgatttccagtaatttctttcctttaatttccttaaggaatatggcagcatccataatataaacaagcgagtatggaaatcatcaacatttgcttttgacatgagtttccttataaattgaactttgtccaattgatttctaaaaccttcaaatgttttagttaaacgatcacctttgttggatccttgtactttccctgtttgtctgagtaattcttgccatgtaagacttccattctcagaaaacatgcgttcagcgaattgttgctctaattcttctaggtgattcaatgtatactgtcttttagtatgctcatttgggaataatgaagggtattcagtaaagtgttgatcaagttttgaaatgtaactttcaacatccttatttggatcgaatttccctatctctggtacatgcttcgataatatttttgcaaaaaggtttattaaatgttcgtctgatgtttgaattccatccaaattctctggtctccatcgttttgctcttgctttcatataacgataatttgcgtaggacattgtatatgtttccctttgggagatttcaaaagggataacagtccttccaaagttccttctcctttgaacccagaaggagagaaatatatatatttatgatatatatttattcaataattcctttttcctaaaaggagttaattgtagatcacaagagttcagttattgtaagctacgcagtttggtatctgatttaaggatacgtagaactgcggtgagttttccttgtgatctattatattacgatacacaggttgtataagtagcaactgagtataggtattgtattaactgggttataatgttacctatcactaatatagctcataactgaactgaggaacgaggttcagcagtagctctatttatagtattcagataatattgatcttaatagattatcattaagatcaatctccatatcgtatcatacatggtacgatatataattagaacatgtgacatatagtgatactcaacgtagtgtattatagcgtagtgtagtattgctgacattaagttccttttaagagggtttacacgtttgatgaactcattaacgatgcgttgggatgcgacaagtttaacctgagacgtggtacaatagctagtagttaatttctacaaagtagcaaaggtaacagacatgcttatagagagatgataaagtaatagtaacaaatagactctcaatcagtcaattttatcaaattaaattattgatttaaaaaataatttgaataataaaagaaaaagtctctgaaatgtttcagtggagcgtgcgttcgatctttctatgaattaaacatataagatgtaaatagtgcattgtagtgtaaagtaatgagatttaacacggattcacaattcgaacgctgactaggtgtatgagaatttcctctgtcaacttccaattttttagattcgcccttgtcccccttttctcctttggcaattgcatacaaaatgtctgactatgaagaggatgaggcctttggaatggacggtgctgttatggaggaggaagtcgatgaactggagatgatcgatgaaaatgggcaatcacagcaaggcgtctctcatcctggtgaaccttcgactaccgttattactgaagatgttgctagctcaaaaacagctcaatctggtaaagcggtagcaaaggaagaccgaaccactactccttatatgacaaagtatgaacgcgctcgtattttgggaactcgagcacttcaaattaggtgagtagatgcgtggatttacaataaagcgtcgtacaaaggcactagcgtaattgcttaagtcctgaatcgttatgctgttttgcagtcatggagtttaaaaaaaaacgatatagttaaaaattttttttttattttctagttaggattgtctgattatgatgaattttgtttcttttcaattgagctttcttttaatttctaactctttattttagtatgaacgcacctgttttagttgatttggaaggtgaaactgatcctttgcaaattgccatgaaggagcttgcacaaaaaaagattcctctactagtccggcgatatttacccgatggcagttatgaagactggagtgtagcggagctcatttaatttaagaagtgttccaatttcaaatacgttctatcgctcgttcgattcacctcgttcttttcctaattcttttgttttacgtgagcgaagccgtttggctatggtaaagaaaagaaaataaaagcaaaaggactaaatttttagctctataccattaatttacgatttagaaatagggacgtatttatcctcgggagaaaaaaaaggcttgtgctactattctagaaatcttcttttcttgtgtcaaaaaattttttggggcattttagctctcgttcttcaatgaatgcatttaataataactttttccgatagttttagtagctgtgtaaatgtaaactcattgatcacggagttttttgtacaactgttaatctgaaaaaaattctagagcacagaaaactcaaaattgcttactacacacctatcattcagatatgttcaaatgttctattactatcagtttcaaagcatggattgcgaaatttacaaggtataatatctaatgagtgtgctcatgagatggatgcgaatgttcaccagaagacccatttaagtgttgccatctatgaacctgattagagtcagaggaaagtggtgtcacgatacaactggaaagggcagggatagcatccaaaacagtcttttctaccttttgtgccaattcggacgactgttgagatgtgaaggatggaggaacagatattatcacatgcatggcatgtgcatttcctaatatagtaacgattttatatggaagcttttctcccttcaataaagcatcagttactgcgatacgtaactcttcggaaggtgctcggtccaaaagctgcaagaaggcctttttagaagagttgaagccggcactaaaaacgacaatacttactaaacaaccaaaaaacggatctagccatggagcattaagaaagtaagtgccggataaagcaagcagtgaaaccattcccgtcaatgcatctgctctatgatgccaggcattggctagtaagatatttgaatctgttttttgagccaccgttctcgctaaatatactattagaatccaataataggtgaaattacttactttttcggaagagccattctttaagaacaacactaccaaatataaggccaagtgccataaaggggtgttcaaacaatagttgagaaggattatgagaatgaccaatgtgcgtgtgttctgaaccagcgtatgggaatagtatagtatacaatctcgataacgatgaatgagcaatgcctacagatacagccaccaataaaccagatacggtgaatgtacctatggtttcccatttgccaaaaccggcagggtacttttgtgtgggcttcttgctacatattttcaaggtagccaatgttaccaagtccgaaagtgtatctcctaattgatgagcagcatcggcgacaagaatgctagattgtagagcaactccgccgatacctttggcggctgctaagcctatattgctgtatctataaaaagtgttaatagtcaagaatatctataataaagggaagaaattgtcaaaagatctgtcgtagaacgaaagcataagagagtaccagtttaaaaatggtctcattaaatatcatgagttatttagctaactttagggctacagttcctttgttgccgctatgctccgaattgataagaaaagatgactttctttttttcttttccatacttacaatcctaaccacgcaagtttcagctctggagatttcccttcttttttcaaagctttaacaagctctaacatttctttgtccgatccatggtcatgggtatgagtgtgagagccaacactatgcattcttacagcattccgaatttcaaagccagatttctcgtgcaatctgctgcacaatgtcggtagaaaacgcggcatcgctcgacatgagcgcgctgacgaattgaacgttttcagcatagtgagttttgtactgttaattcaagaaaagggatatctatatataaaacaaaacttctaaagaagtaaatatgtagaaaacctggaaattagggctcaaccggctgtctgtgaactttcgattgcggatgcaatctatttttaagtgtattaatatttttatcagaaattgcagacgaggttcaggaactttgacttacttaattaaactgtgttcaaaaataaaaaatggataacttaataatccgagcgaagcctaaaaatctaaaaaacctcctatttcaattctgcaaaatttgagcttgcaaactcataattttgtaagcagcgtctgactttcaattataaaaatctaaatatccgtccaattctcttaaattagttaagatctttgttttgtttaggatcggtctcttctatcgattgtgtatatatgtatctaggagaacgtaagatgtcgatcccgtacttatcagatcaatgtgaaactttactacaccagatttgcacatccgagaatcttttaattatggatagtttatttatatattaactaaacactttattttgtagcgcattacgggtttaacaaaaagatttataatttcattatcagtcaagatctaccattattatttcaccaatattaaatagcataaaatatatacattttctttagtaacatgtgaattaacgaaaacgaatgaactagtatacaacaaggataaatgatatttccaagcgttaagcacaaaatgaatattgggaaaggaagtcgcttcggcgcagcatagctaatcattcccattaatatctagctgtatttgttccaaacagtaagacaagcagacgaaagggcataagttgatgtacaatgcaccacttccgaaagagtattcaaaacctcactaacataagagtctccttcactttccgcatacatctgtttcacagcgactgatgtagaagcataaaactttcctacttcagtagtttggtagatagtatcaattgggagaccgaaaacaacctttaccttagatgataccgaacgcaggtatagctcaacatttatgataatagacttatcatcattttcaactgacaaaaagggccaatggtaccataatcgctggaaatcttggacaagataaacaatttgttcccaacaaattgaaacatcgttaagatacttcttcagaagacgtaagttcctagaaaataccttggaatgccatttagaaaacgacgatgcaacatgctcgagcacatttgagctgcaagcattactttcgttagggaacttacaggcaatatcaacgttaacttggaaattttgcctcaaaatctcaaccgtaacctcggctgaataaggagaaagagcagtgttatttgtagctaatttaattccgcccgcggtcaaagaaactatggtccagccaagttcatttttaagatttaacaactgctcctcgtatcgcttaatttcgtcaaattcaaaatcttggtttttcgcataaaaatcttgttcagcgttggtacgtaattccaaatcagagcaagagtttgtcacttgttctatctttattgccaactcctttcttctttcttctttttcactcagaagccgacgtctcctctcaacctcaaccttgagtttctctaacttttcttgcgcctgcgctagaagagttgagtcatactgatttgcaaattccttctgcttctttaatgtctgtactgtagtaatactaccattgtatctctcttgaatttcctgcgcatacggatgaataacattcgcgacatccattaaatgggtcaagcttctttgcatcccagttaaatttaaatttaattcatgtttgattccttgcatcaaaccctcacgccattcgtaccaatcaccttttgcttgaagtctagcaaaagttttcatcattaaaaattgtgaatccattaaaaccctcatatcactggatgctttcctatactcatagaatagtaacgggttctctttcaaagtttcctcttcaattttagtaacaaaatccttcccttcggcaatataatcctgtaattgctgacaactaaatttgtataactctaacaaagggaattgtatgtaaaaagattccaaaagttcttggatactgcatttcttattttcttcagcatttggcaatagggtttctcgtcttttagcaatagtaagattatccaaaaattcaattccggtcattttaagaaaatctgataggcttatcggctcgacgtttggtagagttggcatcgtatcaaattctggctcattaccaacaggtatttcttcatttggaccagagtcttgattcaaaatgttcgtgttaatagtcgaagcgcccaacgatgtatcaacattgctcacaccttttgataatttgacgggtgacttctcatgttcattcatgcccacggaagttgtattacctgcatttgacgaaccaacttgaacaagttcattccggttgggttcctgagattccaatcgctccaaactagttgaatcggcgtaatctgcagttgttatacgctctttttcatcctcattcgaaggttgttgaggaagcttaacagaagaagtcgtattagttggaacgtgcttaatttcgttagtctgttgaattgttagtcgctctgttttactcaatccagaatcaacatctgcattagacacttgttcgcctttgtcatcagtgggttgccttgaaacttcttcaggaagacttgaaagcggcttttctgtggtgaatggcttctctgcggtaagtggagtagctcctagacgataattttcggatcgctcaaccgatttatagagaccagaatttacttttttttcgaaaaagttaaccggtagaagttctctgtcattcaaagttgaaattgattttcgagcattacggattgttgcaagacgattgcgacgcaaggtactttgatcaaaacttgaagtgctatatcttaagcgtcttttccgagtaccaagcttatcagtaggagtcgctaccacatgtctacttggagaagaagagttaggatctttcgaaaattttagattattgttcccatttggtgaccgttcatggttggtaaaggaggtagtattgaaattttctgacttatcactatatgagggtatttcttctctctcggcattttccttgtctgctgaaggtaactcaacattgtttccacggatttgaaaagccactgtttcgtccatagcagcttcttccacctcaagatgagatgtagaattctcacaaggaaaaactgttgaggttaattccattggttgctcttcggaaagtgcttctttagaaggggataatatattgaaaggtctagtaatgtccataaagtcctcactgtcgggaatgggctttgaagaattggcagtcttgttattatcctttctcggttttgaagaagaggatatatttgaggtaaattgatttaaatcatcttcattcaaatgggtgggtgcatttgtagagctaatgggttgtgtcaagtccattatttgctcttccatggatcgtgacgatggacgaatgggggaaaggagagttaaatgtgagttttcgatattaaaggcggaggtggtatccatttcttcttctccattagttaaatcgttcggagaatgattagttaagtgaggattagcattaattggtcgggtaaggttcataggcgcttcttctaagttttgtaaatctaagccattggaaaaatgagacactggagataaattaatgttattagaggtaatatccatgtcaacaatagcttcttgggaagttaaagggcgagcgatgggggaaaagtgttgcggaatttcaataggtcgagttagcatcatatcttcttcttcttctttattttccgactgatcgtgattttcgttatttttggagaaatccgaaatttcaatactagttggactagatgatttgttaggggatgaaagttgagtttggtttgaagggtcatgagaagcttttaaactataaacagtaccttgctcgctagagctaagacctttaattgattcggaatgtgataaaaacgaatctgcttcttggaattggatagtcaaatccatgttagtttcctctctatcattaacctgctctctcgtggcatcgtgaacatcaagtgccttttctgcttcaggtaaggcttttgttggattctggatacttaaatcatcattctccggatacagagaaggaggcggatggccagcattcaatgcctcagagaccatatctgattcggttgaccgaataggggacgcaatgtccatatcactaccgtctgaaataatcgaggcactatgactatggggagatgattgtgtttcgtttctcgaaaaacttgtcgttgttggacctttaggggaatggtttttagcatcagatgcaaaagttcgctcaggtgtgctgtgattagatgtcgacttttccgagtcactctggtgatctttaggataccaacgtacacgtgcatgactagcaaaggaaactcttctgttcaaactttttctagacgtctcacgcgacaattgctgtaggtcttccatttgaagtctctttgacgcagccataacattactagagattccaatgaccgtgttatttatttgtgtgtgtatatcattaaagtcttcatctcctgtgaaagcgggatctacggaaaaggatgaataactctttagaatgccttttgctggatttgtgtgttctttaagttcttgaagcgcaccaggtcctccaagcgagtgtggacgcttcctacttttgtttcttcctataacattatcggtcgtcgctatactattgcgacgaggcgatgttggcatcgtcaagttaaacaaagcacgtcgacacacgaactttgttgtttttagattaagacgaacataagaaattgtaatgatagttcgttaaatttatggcggtgagtttctttttgcggcctagaacgcctttcgttgtattatttaaggagtctgtaagcctttttaggatacggtagactacgatgatgctttctgtaatcattcctgttagctaatctgaataaataatgaataaagatcctatttgtaaaagttccaatgaacaatatgactgttgttcattcttatcattaacaaattgtataaagtaaaggtaaattgggggtacttttgttcaactgggtctatttgtaatattgggttttctgtaaacaataaggtaatgagcatcacaagcatatgcgcactgtgatggaggaatacaaacttcaaaaaggtatagatatctaagattcacttgaatgttttgtcaaatgagccgcactgttcttttggcataatttaatggattaacttgaaagcaatgtgcggttgtaagaagtataagtaaattgtagcgaggttgttataaattattatttcgcaaattgtatattataataatactcgtgaatattcctttaaaggagtgtgtttatttaatatcattccagcggcttataatcaataatcgagaaaaaaactgtttattgttagtatttctataatttgatggatattgccatgaacttacaaccacatgtaattctatgttctactttccattgaggttctcgtaacctgttccatcattgtttactattcaaaagtggttataaaaggttaccggctaagcaaatataagctagctcattctgaactatttcctgttcatttccatggttatacttagccatagtgaaattgaccagacattaattcgtgtacttttccttttacgatgatatattgatcacaaatagaaattataaatccttttaagtcagattacgattgcgttgctaagacctgaaattgatatattatgtactataatccatatgtgttattaacaacactaatgctttcaaatcacagtaaagcttagtaacataactagcatttgtacaacatttaaatgagtaaaaaaaaaacaagtatggctgagctcgcttgtcttaatattttttattagaatgataaatcatataccacgattaggatttctttgaagaatggaaatacaaaaggacgtaaaatgtttatattcggcacaggaaggatagcgttgtataaacgaatgataattgttcagtatttcaaacaagtaaggcttttgtcatcaatactaacattctttttttttttttaaatccgggaaattgacaattcttacaattggatatttgtaaatcccgtgtatcccgtagtatggtatgatattctattcgttgcatttggtataagccttcaaatacgagcagacttggttagcccaatatcattctcccatttggatttagtcaatgttacgatataaatggtcacaaatctccggtatcgtaatgttatccagtttcaaacgacataacatgtttcaatttaataatgacttattaatagttgcataactactgtatttcactagaatcctttacttagcataatgtgtgtgacatgataaaaagggcgtcagacatcttctctgaggaagatttgataaaaatagaaaaagtattgtctatacagcagtccaggcttgtcctttaacaattgcaaaaatatagattattccacaattcatttagcatactaactttacttaaaaggggccaaactaatgcttcaaattgcaaggattagccaaaattgtgccaaaaaaaaaagaaaaaaacacacaataagacaagtatttcttcgttacaacactaaataatgaaatcccaagaatcacgaagttttctatgagtgctccatcataaatattctctaaacaagtggacttaatgtatccaaacataaacaaatacagaaatcacacccattaaatattttatgtaacgatccgcttaataataaaattgtaaatttataaaaataaaaaaataaaaccacgcagtattcaataatatttatctccgggtacaatgaagctcctagtaaatataaaagacaattgcaaattcaggtaatcgaccggtaatttttacacaataatgaaagcattgttacgagactgacctataagatggtattattactaaatgagtctgcaaccacgcctatattaggtcaaaaagcaaaccaagggagaaatgaagtcaataatacgcataggagacgaatataagctgtgagctaaccaaaccgcaataagaggcttacaattgttccccgcatgattttttgaagcttttactataaaaaggagtccttcgtaacggctggcgacttactaattgtcatccaattcaaacaaattttgtcagtcttttatacacaacaatagagccaattccagttcttttaccttttcatcctcaccaatcttttgcgcatagtcgttttaataacctttgactaatatgcaacgaaataacggcgaagggcgacctgagggtatgcatagaattagccgctttttacacggcaatcctttcaagaataatgcttctcctcaagatgattcaaccacaaggacagaagtttatgaggaagggggagtggaagactccgccgtcgattatgataacgcttcaggaaacgcagctccacgtttaactgccgcacctaacactcatgctcagcaagcgaatttgcaaagtggtaacacatcaattacccatgaaactcaaagtacctcccgaggacaggaggctactacatctccatcgctatctgcttcccatgaaaagcctgcccgtcctcaaaccggcgaaggcagtgataatgaagatgaagacgaagatattgatgccctaattgaagacttgtattctcaagatcaagaagaagaacaagtagaagaggaggaatctcctggacctgctggagctgctaaagtagtccccgaagagctccttgagacagatcccaaatacggtctcacagaatctgaagtcgaagagaggaaaaagaaatacggtcttaatcaaatgaaagaagaaaagacaaataatattaaaaaattcctttcattttttgtgggtccaattcaatttgtaatggagctagctgctgcattagcagcaggtctccgtgattgggttgatttcggtgtgatctgcgctcttctgttgttgaatgcaacggtcggctttgttcaagaatatcaagcaggatccattgttgatgaactaaagaaaacaatggcgttaaaggcaagcgttcttcgcgacggtagagtgaaagaaattgaggccagcgaaattgttccaggtgatattttgcatcttgatgaaggaactatatgcccagctgatggtcgccttattacaaaggattgttttctccaagtggatcaatccgcaatcaccggtgaatctttggcagtggataaacaccaaaatgataccatgtactcatcttcaacggtgaaacgtggagaagcttttatggtagtaacagcaacagccgattcaactttcgtaggacgagcagcttctttagtcggggcagctggtcaaagccagggccactttaccgaagttttgaatggcataggtacaattcttttggttttggttatcctcacccttttatgcatttatacagctgcattttatcgttctgttcgtttagctgctctgttagaatacactctggctattaccatcatcggcgtcccagtcggtcttcctgctgttgttaccacaactatggcagttggcgcagcctacctggctaagaagaaagccattgtacaaaagctgtcagctattgaatcactcgctggagttgaaatcctctgctctgacaaaactggtacattaacgaaaaacaggttatcgcttggagaaccttactgcgttgaaggcgtctcacccgatgatcttatgcttaccgcatgtctggcttcttcgagaaaaaagaaagggttagacgccattgacaaagcattccttaaagcgctaagaaattacccaaaagcaaaggaccaattgtcaaaatataaagttctcgactttcatccatttgaccctgtttctaagaaaattacagcatatgttgaggcccctgacggtcaaaggataacctgtgtgaagggcgcccctttatgggtctttaaaactgtacaagacgatcacgaggtgcccgaagccattacagatgcgtacagggaacaagtcaatgacatggcttcacgtggttttcgttcattaggtgttgcgagaaaagccgatggaaagcaatgggaaatattaggtattatgccgtgctcagatccaccccgtcatgatacggctcgaactattcatgaagccatcggtttaggtttacgtattaaaatgcttactggtgatgcggttggtattgccaaagagacagctcgtcaacttggtatgggtacaaacgtctataatgctgaacgcttaggtttaagtggaggtggtgatatgccaggttcggaagtcaatgactttgtagaagctgctgatggatttgcagaagtgtttcctcaacacaaatatgcagtcgttgatattttgcaacaaagaggttatctggtagcaatgacaggtgacggtgttaatgatgctccatcattaaagaaagcagatgccggtattgctgtagaaggcgcatctgatgcagcccgttctgcagccgatattgttttcttagcccccggtttgtcggctattattgatgcactaaaaacatctcgtcaaattttccaccgcatgtatgcatacgttgtatatcgtattgcattatctcttcatctcgaaatcttcttaggtctctggctaattattcgtaatcaattattaaatttggagctaatcgtttttattgctattttcgccgatgtagccaccctggcaattgcctatgacaatgctccttatgcaatgaaaccagtgaaatggaatttgccaagactctggggacttgctactatagtaggtattttgctggctattggaacttggattgtgaacaccacaatgattgcccaaggtcaaaatcgtggtatcgttcagaattttggtgtccaagatgaagttttgttccttcaaatttctttgaccgaaaattggttaattttcataacccgatgtagcggtcctttctggtcttccttcccatcatggcagttaagcggtgcagtattggtggtggatatcttagctaccttattctgtatttttggatggtttaaaggaggccatcaaacgtccattgtcgctgttattcgcatttggatgtattcttttggaatcttctgccttatagcaggagtttattatatactttcagaatcctcttcatttgacagatggatgcacggaaaacataaggaacgtggcactaccagaaagttggaagactttgttatgcagttgcaacgtacctcaactcatcacgaggccgaaggtaaagtcactagttaaatttagaaaaccatttcaacatattcgttatgttaccaatttttattcatattatcacttttttgtttaataagatcaattataatccacgaaaagataaaaaaggttaaataggtgtatactgaaagtcattactaggtattgtagggtaaaagcatcatcttattgcggtagacgaacaattataaaaattgtagttaaccttaaaattcactttaaggaaacactaatttcgcaataaagataatgatgatgaggtattgctatttcaagcattattaaacacttataaagtgttaactcggttttaattaaacattacgcgtaaatcaactaagccattagaatggctaccgtcaaaataaattattagagacatcaacataaataacaaaaggaatgaactttttcatggaaaaaaaagagacttaacgaagacaaatcaaacaaacaatattaaaccgaaatgtatcacaaaagaaagaagttgtaaatcattgagcagtgatacagatattagagtaacatacaaaaagattatttatttttccttctttttttcgccaattctcgttcccgttcgcgttgttcttctaattcatcttccaaacgtgctgcgcgagctgccgcttgttcctcacgccaaacatcatgtccggtggcctccatatcatcttcgtcactaaatacgtcgcgagaaacatagtcctgtttcctcttaccaaatatcttccaaatttcggaggaaacatcaggaactcgatcgttcaactcgtcgtcatcggaaacaacaaactcatcgtgccttgaggtatgaggtcttgctttgggttttgtaatggctgaagaggccgatgttttacgagatgtattgttagacttcaatgaatttggtttggattgctttagtgcaggtgaacctacgtatgaagtttcagaattagagactgtcctaggagtggcagcttgagaaatcgaagaattctgtctccttttcataatttcatcttgtacttcaccggctgaacgtttatctcgttttggtccagtctgtagttgcacaagtccatttgaagcatagcgggctttacgattagaaaaatttgaagttggaggtggttgtcgaggattgctaggagcggcagacgcacctcccgtcttaagccatgctagagatgccgatatttgagaaccacggcctgcacgtaaaccagcgggtggtagactagctgtggaagtagccccactattacgaaccggttgatctctagatgatgaattcttaacaggttttttaggagagtgcggtgattgacttctcttatcttttgattgaagcaaccccgaggaagacgtctcgttgacagctggtgcagaagatgcctgtcgcaaaagctcattatacgaacgaggtttaccctgcctctcattttttttgctttcgagccgatctttctcctttacttcacggattcttttagcttcctcagcggataagggaggccgctccgacgtctgtcttgtcgatgcagctattcttttcgcctccatagcttgctggcgtctttgctcttcttcatatttctgccgtagttcacgctcacgctgtagtttcctttgcctgttgcgttcttcagtaatttcccgtgctttctctcggatctgcgcctttctcaattgttcaatttgaactgcggcttgggcagattggctatctgctaaagccattaatttttgaaatgatggggttcctgccattttattatgagatacaatcaattcttaataatcctcctcaaaaaaccataaataatcagtacaaaaacatgattaccctcctacatgcaatacgatgatggtttctggtaagtcgcacacataagtttgatacccaaaagctaagcgattgtgcaacgtaacgatatatacagtacccctttatttaactctaagaaattttatagggtagggtttacgtgactgtttatagtgaccaaaacttgtagcaggaaacactagaaaagatacgtttgaccatcaccaactacggcataaaatccaatacacagcatggccgaagaacatgatgaagccgttcgcgttgccgaactgagaaagaagagaagtttccgtacttttgcttaccgtggtgttgagcttgagcagcttttggatctctctgctgagcaattggttgatttgttccatgcccgtgctcgtcgtcgtatgcttcgtggtcttggacccaatgcctctcgcttcatccgtaagctccgcaaggctaagactgaagctcctcttaatgagaagcccgccactgttaagacccatttgcgtaacatgatcatccttcccgagatggtcggttctgtcgttggtatttacaacggtaagctcttcaaccaagttgagattcgtcctgaaatgattggtcactacttgggtgagttctctatcacttacaagcctactaagcacggtcgtcccggtattggtgccactcatagttctcgtttcattcctcttaagtaaagagatgcaaaaaggcgggttcaatggatggtttcacttctatcttattcaataatttctttgtttggactaacgttgtacattcgcataaaaacctaggttttttcaagatatctaaatttggtagtgaaagtaacagttgtagagctgcgtgttcgtaaacatgaattatgtaaagagaaatacagacagataatttttgtatttgtaaagtaacgagtgtgtatagttgaaggagcatggaagtgtaacacagagccggacatattgatttacttgacacttgaatctgcaatttgacagctacgattagattgctagcttcatgatgttttacaaaagctacttgtcccactcttggcttgccatctagctagtgaacctatgagaatattttatcattatattttggaaaccatcatttgtttttgtttctcaactagctcgaaataacctaaatggtactacattgtaaaaaccaagctttcgtttacgttttaccaccgtagagtatatgtaccaattctgggtgcttgtttgtaaatctgaatttttttgtaagctattagttttaaggataaataaatatgtttaatgctattcaatattaatggtatatcctaggtcaacttcacaatacactatactctagggttcatccttcatagaatattactctcttcgctatatcttagaactgatatatgcactaattttttaactcgcattagacgagtcctttctaaggagctagcttaatgattatgtacataaaatcttcattttaacatcattcaaagtattctatttagtcgctcgacttttcgacttctttagtctcctgtaactttctcaaaatttgtcattaatcaaccatcagccaaggtctgattgatttggtctttttttgttaagtaattaattttggaagtgcttacactgaagacgtctatatgctcaaaagtcgctgttagtttgttgcctttgcgtgaacttgctttgttaatttcaataccatattgacttgtttttcgatcagtattcaactgtttttattttaatcctgataatcttgatttaaatcaaatttacttcctaaatggatatttacgaacataaaaaatcattcatggaacgacagatacggctgttgaaccgacctatgcgccctccaaaggattggaaacttcctttaaaatccggtcagctttcagaatcagtcgttgaaactgtattccaacgtacgtgttccatgcttttgtctggatttctcctacaaataaaaagttcaaaatattattattaaccaaaacaggattgcaacttcgtatccaaaagcatgcaaagctaaattattcacatcaagcaactcagcatgttgccgctcaaatacgaaagttatatgaacaaaatagcgctattgaggacattacctttttaaatccattattttatggagaaattgatttaagcaatttagacagtgtaaaatcacttccccatccatggccttttcaaaaagaatcccgacctgtcgaaaaggatgaggagcaagagaagttcaatcgtcttacgggagagttacttggtctattaacaacgttgtcagaattagaacaggagcgctctgaacttgagcaaatcgaaaaaatgttggaaccttttgaagatgggccttcttcaatacatacgaatatgtggaagaaaaaccctgaattgatatcaaccctcaacagtacgaacaccatggtagctaaaattaattctcttctcagaggggtttcatttccttctttaaacaatgacaatcaggaagcgtcattggaggacgaaatcagaagccaattattcgaaaaaactatttctgatgattaaaaaacttttcgtagaaattgagagggaatgatgttcatgaactcctattgcatctcatcatctgcttttgaaataatgactaatacttaattggaggagagggtgccttatttcctggtttaaggattttattgactctactagaaatgttggggctatagaaataactttgaagcttctactttacgttcagatatttattggttaatgatttcctagctttgggaggcattaagttagttgataagacaacacatttttatttacaaatgagtgtccgctaaacaaaatacgtttcttaacaattgtcttagttttattttttagtttacagtgtttctaacctttaatgaatcattacagcttataattcaaatactcagctctcgattgtaagtacgttaacattaattttatcacaattataatacctacatacaaggaactatagatttaattatttttcttttcttctgataattcataaagctttatattcctaatgaattcatattacttcacttatattctgaagctgcatatagcatgtaccatctgtaagctcgatgaaatgagtgatgggtaaagtatctgcaaacaatcaatctggtaagtcaatgtgtatcattcttttgctaatattaggattttttaaattttatatcgatacagcgttgcttttaaatgctgaatttatatcctccttcacaaattgtataaagtatggttttgcgcaaatggactattactgatgatatagttctgaatataatggaaaagtaaaaatttcttactcttcttcatctcaggtattttatatatcctagctattgacgctaataattcagcaattcaaagtcatagtgtacgaggaacacaaaagagaagcgtttagtctgtaagttccatgcgttcatcctaaatattattttaaatattaattaacatgctagttttgaggaaatagttcaaaagttgaagcgcgaatcaactgtttacaagaaaccacgcctagatattcatccattcgggcaattgcattatgattttactactttattgaattttcaaaggtacttagacttaggatacggtattgaagatgtgaaaataaaagaaaatgaggacattgttaagtctaaagtgggcaagaaaccgacatcctccgatttttatattccttgcttgataaaacctaaaatcattactccttttgaatgggaaggaaattttaaacaggtcatttattcgcctactgtttacaacgggagtttcaagcgattattttaccttcccgacaataatgatttgctcaaggagtttgcgcatgctaccaacacaaaatacaaggcttctttaaaagataatgtatgtatttgtgaagatacttctaccatcctaacttttgactagaaaatagttgtattagccaataacgatcaggacattaatgctatgttggagaaaatgaagcatatagagaatttagtgtcccagaaagtctatgaatatcctgaagaaactcttgtttatgcaggaaagattgcaccctgccaactgaaatttctaaaattaaaatttgaaaacgagattttatacacagctatgcatacgacatctattttcaaaagcgttttcaatatccttggatctttttatactatgagattattgagaaataaacatgatggtgattcttatgagttggtaccagtttttgctaaaaatccttccaaaacccctccctgtaatgataattttaaaatattttctgatgatataaagctgataggatgtaaaatatttgcaggtgtttctttaaacttctcttctccgaaaccagcgcacagattttacgagttaaataaaacttcatccaatttgtcgatcccagtcttacaaaagccgtcaaattttcattcttcgtcaaccgaattatctgataattcaattcatcaaggaaggagagcagttgatcctgttgttaaccagaataatccgtcaaattttgaagaaatgattatgaacaagttgaataaattacccacgattgataagcaaattttaggaacttcatctttgacccatttccaagataaaacaactgcaattgagcattcaattaataagtctaatagcaagcagcctcctcggttcaaatttcagcttcctcctcgacctacgagcaatactttaccattggaacctgaagaagagctggttactagatattctgtttcttcggatggtaatactgttgacgaagcaataactaaacagtctcagacttttcaattggtcaattcaaatgaatttaatgaagttaacgctaatgatgttcataaatctttgcgacaaaattgcgcaaaattggatttcgacgattcaaagtctaaaaacctattaagtgtagaatgtttagagcttgacaaaggatcagattgttccactccaaaatctggcagcttaactccttcaattgacatgaagtttttacgtttacaagatgagaaaatggacgaccttggtgacaactattatacaattctaatgtcttccaatccggtatcaagctacggtgtgggaagcttatacttatttcaaccaaaaatagtatgctctgaaaaatacattaatcacgaagagattgacaacatgaatttgaaatcattgcacagatggttatctagaaggtctgtggtattgactaaatatgtaaacataagtctaacactttgtttagcttgcatgtacttcaatccttttcaggtgaaattgaattgaatttagagtatgcgtttatttttgaataaatattaatccaacaggtttggcgtcatactatatccaaatatctcatcagatgtgtcggcttgttcacatggttttatgaatatatataaggatttgaatcttccccgatcatattttgcagactggtaggttgagtcttcatatgttatattaacctttttataaagcattaccaaatcagtttcgaatatcgattcattattgaatactcctgtgaaaattttgtttggacgtactgagtatacttatcctttaatagagcatgaagtattagattcaaagaattactttgttttcaagggaagtttattatttacagatgataagagaaacaagacagaggattccactgtatttttttcgatgatttgttcttcaaagttagatcagtttgcgttttataaagattctaagcaatcttctacttgcactatcaattttcctttagcgtatgttatgaatgtttttaaggaaaaaaacaactaatcatgacttatagcttatgggattcccgtctacgtatcgaaacgaaagtccctttaaatgatgcgatacttacagagttctccaaaagtattagatttaggtatgtcaatttctgaaagcttcgactaatcagttgactagaaacgtaaataaggatttactgttagtctttggaaatatggaagacagagtaataattcattcggtcacaagaattaatgaaaactctgtaccttttaacaaaaatttactccctcactctctagaatttatattaaaatgttcaaaagttaagagctatgacattagcccgtcatctattaattccaaagaagccttcgtttgtctcgacagatccaaggaaagcaaacctatagaatcctgtttcagtctaagtatacaaagtgtgtacatgcagtctcagttcaaatataataacagtatacgcgcaggagaaacggctccgtggaaacttgcaaataaacaattcattggtggggctattactgagaatgtttcagacttgtatactgcagcaattattatggtgaatcaattaggggggatacaccctactatttaattaattttatttatgcgttaatatcaattttgtttataccacttaacataaataacccctcaaaccaaattcttaaattaaaacaatgcgaggacccatttaaaacgaaacatatagagtcagtttcatttacccgggttctccaatgcatccaattccactgcacgctcgcgcaatttatcgtatcctttcaatacacctctccattcggaatctgttccataattgatatttatcaactctatgtccctatttatttttcttaaaacttgagatattttcttcctatgattgttgggttcatcagctacactgaaaacttgttcagtaaacaatccaagcatcgataaaaccgttctacaaacttttgaagcagacggagagttggatccatctttaacaactgggcaagcgtcagaccacgagtttctaatgaattctataattccaggtattaaaggatatattgtctgccaacggaaagtagggttatcgacaagatcgtgtttatttggattgaatagcgacaaatatgcaaatgaacaaggagatctaaacgcctcgtatttcggatgtattacaatgcattgttgcaaatagggatactttaaatgaacggatgattgttgattttttgcttgtaacttagggttcaaacccaattgtaaaaaatcgttacatacagttaggtgtcttatcatgttagcggaagacttctttgaaaagctagttgttctcttcacagaggcactctctgagttccacccgagaaggtttgtaaagcactctaatgttttcttccactgtaacgaaattgcagaggaacttagccgatctttacaagcattgatgagtaaggagagaaactttgtagagtcattccgtattgaaggagtaatatgagtcatccctgagtgtgtgtagagaaatatcattccaatgttcggttccagcaattctggccccattatatatataaatttttcaagaaatcgatatagacaatctcgtaccgatgaggattcatcaagtatcaaaggcgatgttaactttaacagcagcgctgtcgacgtcgtcaaaatgcttgtatgagataaaacatattgtgtaagcttttccaacgtctctttaacatgttagcaaaagatgcataagttaatagaaaatttctcttaccctgccgttgattggcattatgatgctttaacattcctaaaagatgtgcaaagtacgcctgatccttagctgttgtattgaaatcctccttttctaaagctgcctgtgttggaagtacgagcgctagatgtttaggttagttatttgaataaaaattccttttgttcatactttttgttctgaatgaggtatcggtaaaattatttggtgcattttttgattttcccaccttgagtttttgtttctaaaaaatcagttaatacagctatttccgacaacaattttacattaaaatcagctcttttagcttttgctttctttgatttacccatatttaatatattgtggaattaattgtacaatttaaacttcgtactttcagacaacgttacgtttggtggagtacccaaaatgtagaaaatgtgagtagtgcctaatgtaatgaaatgagaaaattttcgatttgttaatccaagtcgttttgcaacaacacattcattaataaaaaatttcaatttaatcaaaagatttgcattttgtatgtacgattaaaaaagtgtgctgatgattgaaaaaattaatgtttagttggcattgtcatctttcttcctatttagccgtaaaaatccaaatgccttatgaaattgctccctttcaagttcgaatgatgacatttttgtaacagctggcattatttgagtgctagtaaccgatacggttttgtaaatttcagttggttctttttcatagtaatcatgtaatttcatattcactgcctgcagttgcaaaactttatgctgtaatacatttaaactcttttccatttcacaactatgaggcagtggagtatcaataaatgaactgttgtctttagcgacaccataaggaaatgttagttgataaagtataaaaagtgtcatccccgtaaaagtcagaaacactaggaattgctgcaaacactttcgaaaactcgaaggtgcttcattggttttattagtttcaacgacattagttacaataggtgcaccatcaggtataggtttttccggtagataagatagtattagttcagaaacgtttttagctttgcagccgagtactaataagctagtgggttgatctagagtttttttagaattttgattggcatatccaattagataataagtggtagattgtatattaatggtcactggcgttagtatgggtgtatttaaaactggaattggcagttgtaagcaagaaaagtttgagcttttttcataggttggtttaatagtccaacataaatcaaaaaccgaagtaggttgatcagcttgaattagtacaatgtcgttgcgaggaagaagaacaattcttccttcagttttaggatagccattaactagcccccagtttaaaagtgaagactttggttgtttaatagttaacagctcagttcccggtttcattgaggaaacaaatttcaggctaagcattatgttaaaggagccgttcccaggctgaactgacaaaagagcagaagcaatccaaacataagtagcactcaagggtagtgagggactttggtagaatggtagtttattaataaagaattggaaaggatacttgcatgaggaacatgtttttctgtagtaagaaattgcattcgtctctttcaacttcataggaagccaagagtcatttatagcagtatgaggtattgttaaatcgcatgggaaaggaggtttttctatcgttagcttatagttagaaggggcggggaacaaaatcatgggtacagaagctttggagcccaactgtacaatttccttgaatgtgaatgcgaaggatgatgtgtttgtagtaaaagactgcacttcacctacacgaaattctgacgattgaacgttcatagagcctatcgggaaaagtgttagtagtttgatagcgaaaaggaggaaaaaagttacatacttggtggatcaatgtttgcaatattatatgaatcaccaataaaagaagaaggagatttaataatggtttccggaagtatcattaaaaaccgacactttgagtcgtttcgacataaaccattactgttaggagtagaagctggaaaaaggcgaaaacggttagaggagcgacacgttagtagtagattataggatacttcgcatgatgggggggtagtctcaagcaaagtagctttcacgtctacagatagcgagcaactagaatttttgggaagccaagatttcggtttgtagtatatgcgaaggcgaagagcattatcattaaaggttgaaaattgaggaggaaaaggggaccagtgataagtctccatgttagtagcgtcattcaaagagcgagaaacacctttgttgtaaggatttaggacttcagcaatagattgtgacattgactctttggaaacagtatgatcccaacctaaatgtaagtcagaagagggactgtccgattttagattatcaaaagaaagaatcgtctcaaatggtgacggtaaaaacattaaaggaatatactgttcaaacgtcacaaagtcacgaagcactgggatgtgaatttctagcacgatgtttactttcgagacagtcgttgtatccaggaatgttaaaacgagattattctgatgtatttgtagctttatatcggcggtatctgattttacaaacgtttctggccgagcacaaaaatcattgtcgggagtttttaaaagggaggaagaaggaggaggggaggaactagggtcagaagaactactggaaatggaaataatagatggttcctttggttgctcatcggtagtcgacagagtaggaaataattcgtcgaagcaatcaacactaaaaaaactgggagatgcagtaaaaccgttttcgtcatttacgcgagcgctaatttgggaagtttcacgctttaaaaaaactgtggatgggccatgcagagaatgtaaacgggctcgcagagaacagatggtgaaggagcatggagacaaagttaggaagggtaaagagatattagatttttgcgcaatgggtataattgtgtagtttaagcgaaactgagaaatgaatttgtcggacaaggagccatgcgcttcaaggcttaaggaatgaaaatcattgttggcgctagaaggggaagggaaatgagaagacgaggacggtggggtcatagtgaaaaataaaaaagaagcgcaaatcaaatcagcaaatgaattgaaaagcaggtaaacgagcactttatttcatgtaatgaatgaataatgaaggaaaaaggaaatacttcatgagctgcatacaaatgggtttaggaagaaaagagatgtaaaaagaaagaaatgatgtggtactggagatcaggcaagacaaagaagcaatcagtatagcacatgtaaacaaagaaagagccagcagatgatggaatggaaacagcagcaataaacagccaaaaataagaaaagaaaaggaaaagaaagattgaataaaaaaaatggggtgtatgcagggggaatgaaacaaaaacaagtgggtgaagacgaggccgaccgaagattggtaggtgggcagtgggtagatggatagtaggcgataggaagtaacgagaaggtgaaactgaaagaaatagaaaaacaatgattttttattttattttattggtttttagttctggtggttttttctcttctagctaatcccttttaagcgtatttcttttgtttacatgggctgcatttacccgatacaattataatatgaacacacctggcctgcttacgacaatgagcagcgatgatctcgctatgattcgttgtgtaaaataacgatgtcattcaacaacttttaatactattgcatgtttagcgaggattagcagcaacagaaatcctagacaaggacagcgtagtgaaagattatcgttatagggatagagagggatgcaaagggtcgtgctgacaaaggatggacgatttggttcaatggaagagattgtttacttgtactaagtgaaaaaaacaaaaagcaaaggaaaattctttttcaaattttatacaatggttgcttagcaaaacttttttttgttttctatctctccaacgattccaatctcgaatccttacgctttcttgaatgactccaatctttcaaatactttatctggtcgggttgttttataactgttgaacgaattgatgaacgattatttcttttatttctctttcatcttctcacccaagcctatcacattagcgggattgctgaaaaatcatgtgtttacacttccacgtgctaatttcctttcatcccagcccattccatttattccactacaaaccttgaccatgtaaacattgagaaacgattgggttgaaggacaattgggttctgtttgtatcaacaacaacagtttttcctctagtaaccaacgaccaacaaaatgcctgaacatagaaccggtgtgaataagcaaagttggcgaaatgaacaaaacaacgttgcgcaaaccaataattgcactttgctactgtcaagtgatgcgcaacattcatttactcatcaacatcgttatgataagtgtattgcacttttatcaaacaagttttgcaatttagtatgcgcatttcagagaaaattcatgctatagcaaactcatgttgaataacaaaaatacgcacaaagcaaggcccattactttcttgtaacactctatttttggggcctttacaacccgagaaataggatcaatcgatcatccttcactagccttgtcacttgccttccgtgtgtaataccaacggaactcattctccggtaggaatgtacttctgctgccttcatagtcgctactgcgcagaccgaaaaaatccgaaaattctttaaatagcgagagcgagtgtatttgcggaaataagcttaacaattgatgatggaacacggaaactaagcttaaacgaatacagtcactatcgttatagcgggtcagaaaggttgcaggcagagaaagtaaatgcgttagactgagtatagaaaagtatagtagacaaggcattttggacaggcaaggcatgtcggacacatgtgtaataataaggcataaacagttttaatttttaagagtagaatttattacaaaaggacttttaagtaattttctttttaaccaacaataggactcgacatttacagttaatcgagtttttgttgtgaaaaattccaaatcctactttttaattacatcttcttttatattcatattcatattcatattcacatccacattccactcatacattcacatcataacattcattttattatttctataaacaatcggttcaaaaagaaccattcctattgtttaacgcttctttctttcgctgtgttccttctttcccttctatgatcatgtagttttctcctcaattgattctaaattgactgagaaatacacaactattttattatcaagttcaaattgttaattcgcttttctcctacctacttacttagttacctcgtgtctatttgtctctatagtaaccctttcgcccccattttatatatacacccccacacttcctatatagcgatatcggcgctactcacttccacagccggttgattttactgcattccattctctttcgctatatactttaatgcacttgaacgatggttcattgcgtgctggcctgggtgttgctttcaagtctttgcaatctttgattggctatctaatgtttttcccaccacttacaaagcgacttagatgcgataagctttggggccgatgtcaccccgatcgttcgataagccctctgataaggcgctgtccctactattatgcctcctctctctaccaatcaaaagttgccgtacctgtccataatagctgcatgaatgttgactacgtagtggctttcttgtcacgttcttcctatttaagagctcgttgcgccgccggtttttttcttttccttttttattttaccactacaccaaacttactaacaaccaacaacaccacaactaccacacaattttactagtacagcgttaacatcctgatctcgtaaatcgtctattacatttattttaagcttttaaatctctatttttttgtcttctactccatttagtgttgacatatttttttttacatacctcagttttctagttacttttcagatttaatttttcccaagatgtgttaaattatctataaagtcctcgtttttttaagttgattttacttccttgttgaaatcgaatatactggttgtttttgttgtttcggatcttttgtttccacccccaatattacgtttacaaagcatgcttcgttcgtcctcgtgtcgtcgttaagtctttttctcctaaatcattcaaaatgttgtctcattgagaatttatcgtaggttgtttttcacctcattttttttatcttcttaattttgctttaggttttctatccctctaccaaaatttttctcctatctctttgtttatcgaatatctttttagtatttttcggttaatcttttctactattgtggttgattaaataattttctctcttattttaatcgtcttccttttatctcttttttataattctccaatatgatgtaactcgcaagttaatttcgttggaataatcctttattatttactcatttcggtcaaatatctttcttttcctctggttgtaacatttagagtctttagaatctctacatcgtttggtcgggtctattgttttttttaactatccccaaagtgcattatgcttcttatttttttacaaagtcaacattaaacatttattactttttgtctgtgtgtgactaacatattactcgcgtgtgattgaattcggtattataatttcgtttctctcccttgtttttctatttttttttataattatctttgtgtctgtgtgtttatagcaaatccaattattttgttatcatgaattacaacgatactactgaattttgtttcccctttggtcagccctctttccctacttcggctatgactgaagggtcgtttgacggtcaattttccgaatttgaccctactttcacttcccccgctgatacagcattatccgatatcgcaaatcttcccattgatcttcataaggatgcccttttcgccaatgcgccaggcaagggagatgttgattttgattcggtttcaatgttgcaactgctttctgattatcccttggcttttaactctacggagaataatcagaaattgcaaaccaacccctctgctcgttggtctcttcttgacagcatggatttcgacaatcaaaggcaatgttctgatttagagtctgcgcaactcggtgattccggattgctaaagtctaccatactgtcgaactctcatattgacattgctgccttgtcttccagtaagacgtcagaacccacaccccctttctcttatgtacagactccctgcatcccaacgccaagctcggcattaatcgatacaccattccctggtgctcttgattccgagtttggtttcgatgaaagtcaagcccctcttttccctgcctctgatggtgattgtcagcgtgcgtttgcttccatatcttatcccaccaactatggatgcaagctaagcaatctgggcttcatgtcacctcagtcgcctgttaaaagggagctgaacgattccacgtctccctcgaagctctccgaatcgagctcatccttgactggttcgtcttctgctttgctatcccaatctgagttcttgggctcagttcctagcttgtccgattcgatcgctaccgttgatccattcttttcgtttgaaagctttgaaacagatgaaaaggctcgttcattactcatggatgcttcacttaagttgccccaattttccactcctaatctgtcctctaactcttcttctctcagtctgaagtcgacgttagcagagggaatgaaaggctctacaccccttgctgccgttaaaactgaaaaggctagtaaggcagcacgtgtaatgaaacaaaagaaacatcgcgaacatgtctgttttaactgtggagtcactgaaacgcctttatggagacgtacatcagataagcttaacttcttgtgcaatgcttgtggtctttacaacaaacagtatggtgttatgagaccattgtctcctagaaacaaaggctcatctaaggcacttgagaatttggtgtgtgccaattgctcttctacgaaaacttcgttgtggcgcaaagatcgtcacggacagactgtttgtaacgcttgtggtttgtatgcccgtcttcatggccacaatcgtcctattggtttgaagaagaacaaaattacccgacgtcgtcgtggtaagggccctggtggagaagatggaatgtctgacgaggtaaaatcagaattccccgtactctcaaaatccgtcacgatggccgagatactctcttcaaagggtcttgaatcacctcagcttaccaactctgtttctgtttcgaaaatgccgaataccgatgctgatgtttcgttggagcatgcaaaaatctcttttgattcgttggacaactcggttattgtcaagaaggaggaagaaatagagaataaattttcggtctcttgttgaaagacattactaagagtctattgatttttttttcaccttggtttttataaactcttttattttctactctagcttttgtttatgtttttattacagcttgcaagtttcaatcgttttgaagactacgcttcgtactgaaagattacttttgtagctaaaacctatacatttgaatacacatttgggatatacttttgattagatatggcataaagggttgatgtgtgggtttattggaattttttattttttcatttttcttgttctttttttttgtatcttgcttttgcaactataaacaaaaatttcacttgatattttatttctagtcttactgattgaaattaaattgactgatcaatttttaagtgctctttacattttaatgttgttgctgtagcttgtagttttttttagtcttgaagttaagttgtgcaaatgttagttagcgaatacgcagtttgttttaaaagtagatacccgctaaggagtgtgtaacaactcaactgccgaatgaactagccctgaaaatggatggcgcttaagcgtactacccatacctcaccgtctgggttagctttgagaagctcagacgagtaggcaggcgtggagcatttttttgtatgtaagaggcaaagaaactttgttgaaacaagtaacgtattaatactctttgaattagtttggctttattcaaaaatagcggtgaattaaataacaataaattattgatgtattgaatttaattaagcactgataaaatgttataaaagcgtgtttgtcaattgttaccgattcagtacagtgtaaggacaatataggcatatttgccattagccttgctttttagctttacacaacgaaaataatataaatattaaaacatatgaattgttaataccgttatgcagaatgcaagacggcatcgattgaaaatcattgtaagaaagccatggaaaacaaaatcaggcagtatacaaaaaagatatttaatacccaaccctgatttcaagtaaacttctatatttcccaattttatttatatttatttaaaggttcctgcctaccttggatgaaacaacaataaagtaacgggatgaactaaacccaactttaagcctctccctcaacatcgtccaacttgaccaaattattttcaaacaattctcttcctgtcattcttttctccaatatagccttccgtgcattactcgaagatgcagcactcaaagcctcctttagttttgactcttgctctaattttagttgctcattccgccaagcatcaaatccttttttccattccgtaaatgattcaaccgttactggcgttccatggaattttttattttcctgttctgcttcctttcgatgtctttcctctatagcttgtgtttcgcgctgagattgctcgataagaatggcgttagtctcctccttagcaacagaacataatgaaaatatcattgccattcctaagcattcctctgcctatatatgaatgattagttatatgatggaaattataaatatgcatcaatgcttaataaaacagtgaaagagctttcctagtggacaaaagcaatcctcagctacttctattcttgttcccttttcgattgtatcttaactggttcatacattttgagcgacaacttgttttagtctctctatttcctcttcaccaagccaaggatgaggttcagagaatgtaattttaacgtcgggcacttcatctggataagcttcactgagctgacacgtgaaaattaaggaggctaattgatcgtataagttagagagtcgaccataaccaaatactgttgtaaattaaaaaaaaaagggcttacgtggattatcgcaattcgattcttcacgatcaataggttgagtaatctcaaatgtactgtcgtttatacctaactaatgttaatcaataaattttccaattgatggtctattaaatttgcagagcaaatatttgaatcaataaaatattatgcacatttatgaaatctcactctttccgaaaaaatttataaacaaataacaatatttgacttacatttaaactcttctggatatattgattccaggatttcccgttcttcttcgattgcagaagtcatttgcgtgaaggtggaatgcaaatgggctatggcaggtgtagaaactcgagatcaaggtgtagtaatcacctgaaacaaaaagcagctataatgtacgttaaattttcgctcttaagaagaaatatatttataaagctatttatttggtagctaaatagtcagactggtacaagcgttgacactattggaaaagttaagtaaacaatccttgatccatctctgaagagaatgattagtaatgaaggattcagtgcctttaagaaaaaaaaaccccccaattgtcttttcaagcacatttatattgttatgtatggcatgtaaatataatgcagcatgtgtaaaagaatattggacagttgaaaggaccatgcttatttttaaaaaaggaaaaagaaaataaagcagatgaatgaaattgtaataccaatcttttgatttgtgggtcttttcccctttatttcagctcgaggttctctttctgaaaatcaataaatatagcacgaattgtttaattattttcttgttgcatagcttcggttaaaataaatatataaaacagccctagtatttcccaaatgtgtttactagtcttttcatattttcaccggcctgttggttttaactgatcaaaagtcatcaagccacctgtttttcactgcaaatatcaaattcatttcaatacaatagaaaaaatgatgtgaattagtttgcatagaaaaaaacctgagactagaactggtaaaaatttctgtgcattcacaattgtggggaactgaaaaaatagagaatccaaaatggggagaatccgatatagactatgttaaatctaataaatttatactccaacccattcactctaaactcaagctttcttgtaaaaaacatcaatactgttttcttaaaattccatctctattactcactaaaagagtatataaaatattaaagaagcaattgttcaaaaagtggtcgcatgatgtagtcggttatcatgtcgatctaataagtcgaatgtcgccagttcgaacctggctgtgaccatatttttgcttctcaaaattaacaatattgtgagcttgcactgaaatgctgtatcttacataccgttatttttgtaaatagtgtatcgttaaaacaataccttctaatagtggatagcgcactcaacggttctgatgctaaaaaatgtcacatttcctctatgcaaaaaggttggatgtcttacctaaatcttaggtgtgtgtttttcttgtgctaaaattatggaaatgtcactgtttgtgatgctggattccgactgattcactcatttgatgaaaaaaaatgaggcatttttcttctacctccatctgctacttggatgttactttgttggaagaaaaaatcaatcgaggtattattgcgctgtaaaagagctgattttagggacagaaataatcgctcatttcgtaggttatggtatatataaggaaggtgtgatagagacattcctggacgcttaaccttgagacgattgtttgactgaaaggctttggtagaacattgggttggttagtttaatcgtttaaattcagtttatttacttgtaatttttcatattggtcgaaaaattggttttttttagcaaaatatagaaacagaatattttctttgaaatctgtataaattcaatttgctcttcaattcgttgagattctgcccattgattgccgaaatttcgttcattttataattgtgttttctttcttttcttgtctctcattttctttttcttccttttgatattcatttctccattgtgtttcgtagggttaattttcatctgcatatattctgttttcttgttttttaagaacaaaaatttttcatctaaatatataattgtcaaagttagtaagatactggtcttccctaatcttcaagttttcttttaactctttcgtcctttttttctaaaactcatttactactcttctggttttttatttttccctagaagtcatgtctttcttctccgctgcaaagcaaagtctgggtaattccctcattaagttaggaacatctatggctcaaaattcccaaggccctgtagatgactctagcttgtctcaattggagaatttgctcccacctttgcaaattttgactgctagagccgctatggctgctatgaacatgtcgaatgatacatccatgtctggaatgaacatgaccaacagtacgacacccatgtctggaatgaacatgaccaatagtacaacatccatgtctggaatgaacatgtccaacagcacaacatccatgtctggcatgaatatgactaataccactacaaccgcaaaggcttcttcttgtaaattatccatgtattggaactggtatactatcgatgcttgctttattaccaaacattggcatatcaccagtaagcatatgtttgtcggtagtattttcggaattatcttcatgatgatggcattggaattggtccgtcgcggacaaagagagttcgatcgttggtgtgtccgtagattttctcccgctagcaattcctgctgtcattcgggtgcccctgttcattctggtccaagcatggcccttcgaatctttcttcattttcttcggtcctgcttttatctagtccagtatattgtcgcgtatatcgcaatgttactcgcaatgtattataatggctatgtaattttatttctcttttgtggcaccttctttggctatttcctgtttggtgcggataccatctctactaaggcctcttcatctgttcaaacgaaaacgatcgttcaagtcgccgacgaaaaacacgaacatgattccagtcaatattcagacacaacacctacaaccgaatagcttgattatctctaaatttggtttagtattcccaatttcatgcacctcactcattttcagtgctgaagcgtctgattaatcataatcgtcttcgctttaatttctttcgcacagtcactgatagtttggaagaggattctttgatgaatgttgaagccacatattacatgtccatgttggaaagacaaaacaaattctggtaatttgtcttaagtttttacaaagtaataaaagtttcaacaaaaataaatagatgccacaaggtaacgcttatctttgttagttaaacattcaaattagagtatatagcaatttgaacagatgtaattcgttcctttttttttttaaccatgattgtttgttttcgactttgaacctggaggttaataaatatttattattataaagactgacattaacacgattcagtacctttatggtatcttaaggtgatcactttctatatatttttaaatgagtttgtaatgacatggtgcaacagaactacataagatattcatcaatcacatttttgacgttcagaaaccatttgtcgatatctcggaagattaattccaacagcagatcgtattaacaagacatccacaataccatcctgccgctttctcccaacaatgttgagccactcatgcttttgaatagatacatcaggtaaaactactgtaacatcacaagtcacgctgcttgatccatcaatcaaccgtagaatgccattcttatatgattgcacgcatcctaaaaatcgaagtttttggccgtccttacaatcgttaatttgattaatgaagataagtttagcactatccatcagctgctaaatatattgtaaaaaggagaacaaggaaagatgagggaaggtggtatagtttgtgtttggaaactgggtaatcgattgaaatatgaatttcgtaaatgagcgacttaagatcgcagctttaattaagaaaacgtagtttgactttttcaaaaggaaaaatttgcattaatccttaaaatgtgcagaaagactacactctcgtttgcaatagtaaaagcaaaatctaataatcgtatagtactatcagtgaggcatattagattgataaatagaccaacatttccattattattatttatgaattggtttacttgagcaactccacaaaaaacgcaagcatggttcttttgattagtttttataaattaagtcagatggaatataaaaagagaaaaataaatgctttggccgggaatcgaacccgggtcgaatcgatggcaacgattcattataccactaaaccaccaaagcttcttgaaatatcttgtaaacttgtataatataagtagctattaacgataacgataattatttattataccattataatattgattaaaatcaagcagagaattggaaacatgttctgatgtagttgtttaaggccttataagaaatcaatagttcttgtaataaattccgattttagttatagggccaatgcggctaatattcacttgataaattgaagctgactgtaaacaaaaggttaccccttacttaaccatttgatattataatttacattgcaaaaaatttgggtcagtttgaaaaggtgtgtacatttcctaaaaatctatggaaaattgaaaaaaataaaataaatttaatttaatatttaaaatatcatgcttccagtattcaatataatcggtatttaaattgaaccatgaacagattagaaatggtttaaaaaaaaaacagcaaaacaaaattgtattgaatttatcctacaatcaaaatgccgttaacaatattttttagcttgaatcttccgatttctcttaataaaccgtcaaagtgccaaaaaccagttttaatataacgaattatataatatacatttaaggtgccataaacacactgcattatacgtattgaaactaagagtgtggatactgtgcatatagagactgctaaactccaggaaacccgcatttggagagtaatttcgtgtttttactcggaaaattgcaagccttaatacgattcttgtaaattcaaaagttagaactcttccaagtgattttttgcgtgtttttttgctgtttattttttttttgcattgagctcttttgtcacgtcgttgctatagcttttaggctttgagaatcttcgttataactaatattatttgaagtgtgggtttatccaaaaggccctttacagttttttgtgttataaccttttctcaaaaaaatttaaagcatcatttctaaagcgacaccaaaattaaaatagttgaaagagtaaaaacatgttgtttacaatcaaaccttcatttttgaagcctgtaggcttcattcagactcggaatttgaaccggctataccctaaacaacgtattcctaagcgacctaaaattcctatgggttccaaaatagcagaggtaactgaaactacatctgcttattacaatccaccagcgtcttctccagatgttaggattactcctcctgtttttcgctatgatgcacctccaattcatcagcgtgatacctcactttccaaagagtcaatgtttctcccgccggcagttagccgaaaatcgaaaagcaaaggaaagttgaggttttctactcatcaactgagtagtgaagatatcaaatccatccaagacttgaggacgaaagatccgaatgcttggacaactggaacactgtctaaaaagtttaacacaactcggttactaatttcacgagtttgtgaagctcccaaagaaaggattcaaaaagttgaagaaaattttgaggctgaaaaacttgcctggggatcaaagaagcgtgaaattcgccgacaacgtgcatctcgtcaagcattccgtacattggaacgagtagcacaggtttaaaataatttaatagtttttgggattctaaaactctggttttcaataaagctctgatgcacatgcggaagcgtttttgactgcattatttaatgtttcaatcacgttacaaaatactcgagtgatttgaaagttccttggaaaataatattagttttgaagcttttcaaaaaaaacagacatcttcattcttctttatttcttaatttacaaaggctctctggcattttacgaattatcctttacatttctatcaacatttacgcacattggtctgcatatcgcgaatttttgtcgcaacctttaaaatgttattatacaggcacgaacttgttttacatttttacctctcccttctcatgtacatatttcctttttggaacaaatgaggaaatttttcatttcagcttagtaggctcggaaatcctcaatcatagagtatgttgcttttgtaacactcaagccagtttttttttttttttggttttatcttttaactattactgagaatatacaatggtgtacataattaattgggtcagcgagcagtaaaaaaacatctttatttcctcttgtacagagagccctttcgttcaaacctcaagtggtgaaaataaagatattttttcggcttttaagcagttgctatttaagatttccaatcgacatcaaccgtttataaacactcacgagatacttacttttgcaagtttcctcaccagccatcatccatccatctccttaggacaatttgcattctacggatttcattaatacatccatctctagctactatttacttatattaaagctttgtttcgccgttttctacttttttgaagcttgtgtgactatacgtgctcttctttgttggcccaattttccaacgatcgtctaaagaaacatgcgacctagttgaggaattttgctttaagacattgtttttacagactctaacaagcttaatttgtatggtggacacagctttgttgtaatactgcatactgcgattctcaaatcctacactcctctctcctcttctctccttgttacttagtacctcgagaagttttggggtgacatcagtcagacacaagaattatatgatgggtgggtgggttaatacgtatatgaatgatctcatttacgttgccgtattgtgctactaaaagtgttatatatagagcagtgggaagtagaagtgagcactcttattaacgataaagttgtgagttgaacaaaagcgacttactactttgaaatattgttttactttacaattgaacatttactagtgttcaggaaaaatctaattttttttcgtgcgctcgattgaatattatatcaatcctttgtgttgtacggagaaaaccgcttttatataacctttcgatttattaatttttttttactcggttaattcacgaaatcctaatcgagcatcatgaataggcgtgttactcttggagccttggccgctgctgttggtgttggttattatatgactcgccataatcgtcaggcatcttccagattggaacagaagaatgcagaaatcgtcagagccgtggaaaatgagggtcaacgatttgacaaagctgttggcgaaaccactgaaaaggcaaaatcttatctccaaagtgggaaggagagggttgtcgatgaactcgacaaacctcgtgaaaacgtaaaaaatgtgttgtcagaggcgcaagccaagggtactgaacaagcagaagcccttaaaaagggtacctcaaaatggttttaaattggaaatccccaattctcgccatttagggttatgtggcaatactttgaaaaaatacacacagggtttgttgtgtatttgaaaacgtaaagtgcctagcattggctcgttctatacctgctatccattaagtgttcttgttaattgttccaaacgtattgccaaacattccggatcacatctcggcaaagtcggagagattaaacgttgttaacgttattcttttttatgttattattagtttcttctctcataaaccaactgaacccaaatgattagcgatgacaaacaaacgacgattccatgggttgtcaaaaacaccctcatagaagtttgcttttttttgtacagataaaagcgaatttttaattgaaataatgtttttcatgaacgcataaatgaatgattgaaatttttacatgcatgattttccattatagactgtaaaatgatatttaaagtaagcgatgtggactaagagtagtgataatgcatatgaatacatgcatagtttggatattataggtttttcctagtttccattattaaaaaaataaaagattgaaaggagtgttttgctttaatctgctctagtagacagagtcaaaattgatatatttaataatattcaagatgaagagatagaactcatcaagttcgcttagatataaccttagcttacgcgaaagatgagaatactgtaatgcatagttttttgttaatttgagacaacgagaggtatggaaaatgcccctcaggtgaattctctaaataagctaaaaagtcaaacgcaaaaaaatgcattatgccggtttatagaagataaacttttttttgctgacaaatattacgatggaattgtcgttttgacatttcttagccgtcgtacctaatgcttctgactgctaatcaagctctaaaaaagcgcagttcgttatacttctctatcccgttttcaccttcatgacaagtcctgcgtatgtatgcattctaccatcttccattattcgcacttgggcgtactcagctaagctggttttggcgtattcataaacgtgtctatccttcaacaggaaaataggtacctgaagaaaataagatgggtctcaaattacttcatcctcctaaacgtatgtaacggtttagctagacatataaacaaacttgaggattcttagttggatgctcgagcatcgtataggtagattaaaaccgcaaaataactaactttatacagcttatgcgatgaccagtgaccctgagtcgtatgcttcggtatgtgtcatgaaaaaatggcctattatagctacgaatgtgattgacgaggtttctcgaaacatatcaaaggcattggaggcgggaatgtccgataaagctgcttatgttactcaaggaaaggaaataatcagccttcttaatcaactcaaatatgatcttcaacacaatcgccctctgaagccgcttgtcggtcaagggcctgatattgatgactataatgaggagttggaacaagttggtccattgacttggggcgatgctccctggctttatgctggatgctatttttatcgtatcatgagtcttttctttcaagcccgttctgagtggaatcgccatgaccccttctttgaacaaaaggacttcacattacgttctagcaagtcggccattgaagaatttgccaaaagatatgtacacctgaacagtgaacttgcttctattcaagaaaacaaggatgacaaggctgcatacatgatttttgtagaaatggcggaaatttcactttggggcaacgccattgatctgggactcttagtaaatgctacctacgaacaattacaaagccttcaggggcaaaaagctgttgaggaatcccagaaaaacattttagtgaatgatttccccaaaatttggtcgaaactttcaaaagttcgtcatggtcgcatcgattttgttcttgataatgcgggatttgaacttttcgttgatcttttattcgctacttatcttttgaaaacagaaatagcggaaacaattattttacatccgaaggatgtaccctggtttgtttccgatgtcttagtcaacgacatcccccatttatttaacagcttaacttcttatttttcaggcgaaggtgtccaaaaattagcctctgatcttgcggagtttcatgcggaaggaaaaattgtaattcgacccaatcctttttggactactgctcattattttggacggctacctgatgttgctcctaaacttttatctgacttagaacaatcagatatggtcatctttaaaggagatttgaattttcgcaagctcaccggcgattgtgagtggcctcatacaacaccttttgcggaggctcttggtccaattgctggaaaattcaatattttggctcttcgtacgattaaggcggatgtggtggtagggcttggaaaaggcgtatacgaagaaattgccaaggataatcctcattgggaaaggactggtaaatacgccgtcgttgaattttgtcccaaagactaaaaatttctaacattttaatttaattgacatatggctgtggttggaagtatcttaattctgctgcgttctttttttttatttttttttctctttttttctttcactcgtttttgggctattggactcaatatatggaacctcacggtgataaagtcgcagcagaataaatcaaaaggcaataatgaattttttttatctccttttcttctactattactgtcaatacataccaaactgaattacaaatacccttgcataacctcgaaagtataaaaaacaaatgtctttcatttggtgctcacgcccaaacgttaaaccagcaacaatttgtgttaatttctctcccgctttcttttacagatatcaagtttcaaaaataccaagtattaacaaaaaataaatacttggattttgcaacgactatttacaatcctttacatttttctttaacttctgtgattttctatgaaacgcagttgacatgattttatttttctctttatttttttttaaaaagaagcaatgtctagtattgttgaaattttagcttgatgtttgttgaagcaaatcatcattttgcaagctgaatgagcccgagtgttacttctatttactattaatctatctgattttgtattgctttaggtgttaagatcatgtaatctttggtatacagaaggttatgaaactggaggttcaattttgcttttctttttttttttttttttttttttgaaaaagcacgcatctcacaataaatcaataatttttgtagctctttctaattttatatataaacgtgtttgtcttctttgcaaatgagaaagactttgtcttgattttcctgtttatttatttactttcttttttctgttacattgttctttcggcattttccgttcaaaagttactctttattttaaggtacttagaatttggtgaatctttagttttcttttcttgttgctaattcaatattgatgaatttcgttgctttttaaaaatatttatttatttatgttagcattcgttttcgaagtcttcagcaaaatttcaatagttcaatagatctttttgcgtgccaattgaaaaaaaaaacgataataataataataaccataatggaatgagcatcgtttgattaaacaacaacatcaatccgtttactaaatgaatctatatcctatgccatcttataagtaaaaaatgaagatacaaattacagcactctggtggaacacgataaaccgattaagaatttattattcagcagacgttatttaatttttgataatctctgctccactttgctaacgtaacgactcgtcattgtcgatgtctttaacgacctttgttacggtcctttaaaaagtttaaccaataaggccgaggccatctttgagccaaaatataccatcaaatttcactttgcctcttcacatacccaattccttagggatttttaaaattttagagtattagtgttattcacttgttgttacgcatatttttatagacctgtttattccccaaggtttacttgtgtaattccctttttccgaggtcgaaaagtgaaatttcttatgatttaatgagtacattaaattgattaagaaatcaaggaagggaatttaaaaaagtatcgctcaaattgtttttaactgacaacttatttttatgaagttgtttgagcgaaaaaattaatatatcctatcgcttgttgaatttttatacattgtttgggattgtttgtttagtttagtcattcaagtttgtttgtatctaaaagcaaaagtctttttttgttgcagcagtaaattctccctgcattgttgaataaatacttatctgatcattgtggtttagcttatttttgctttatttaattcatcaatttcgttgaaagtgaaagtctccttcattttcagcttatttgctaattttgttactgtttaatacaagaccgtttcactcaacttcagaggtttcactagtatagcggaaaatgggcttcaagttgaatccattttcaaaaaagcccaaagatgaggagcctttacccttagagcaatatgaagcttctgagcaaaaaattttaggccttgtcactaaaaaggaggccaaacttcttgcaattgctggtactggttttcttttggacagttacgatcttttcattattaacttggtttcgccaattcttgcttatttgtattggggtggattgacaggacatcaagattatccttctggtattcgcggtgttgtaaatgctgctaccaacattggaaatattatgggtcaacttttatttgggtttttgggtgatttcttcggtcgtaaatttgtctatggcaaagaaatgatggttgtcattatcgctactattttaatcatttgtctccctgatcgtattcctacaccgactgctaaaatgatgtggctttttgctttccgtgttatgttgggtattggtattggtggtgattatcctatgtctgcatccatcacttcagagcagtcattgattaaccgccgtggtgctttgctcgcttggattttctccaaccaaggatggggtactctggctggctgtgttgctactttgattattttggcttgtttcgaaaaacctttgaatgatcgcggtgagtatacgaagctgaatggcgtttggcgcattcagtttggcattgctctctttccagctgtgatcgttttgattccacgcttgcgtatgcaggaatcagaacaatttaagaattcaaaaaacatgaaatctcccggggagggtgatcttgattctgcctctcaaatcgaattacatgatttcaagaaaaaagagtccttaactgcggagtttacaacttcttccccttctacagcttccttgtccgataaaaagaacccaggttccgttcatatccgtcccaataacgaagttgctcccagcagtgctcctagtcgtgctccttctactacctctgtcgaatctaatacggaaggtaaggagtctgatattcaaaccggttcttcgtttgtttcatactttaaagagtggagacatgctaaacttttaattgggtctgcgctttcatggtttttgcttgatattgctttttacgggataaatttgaatcagtctgttattcttcaagaaatggggtttaacaaaggtgtcaacgaatatcatattcttcaaaagaatgcaatcggtaatctgattattgcagttgctggctacattcctggatattgggtgagtgtcgtattgattgaggtaatgggccgaaaatggattcaaattcaaggtttccttatttgctgtcttttatttggcgttttagctggaacatgggaaactatttcaactggtggtcgctttgcgtgcgtcgctcttgcccaatttttcttcaactttggtccaaacaccacctgctttgtcattcctgcggaagtgtttccctccagagttcgtgctttttcacatggcatatgcgctgcatgtggtaaggccggtgccattttatctgctcttctattcaataaacttaccgaggtaattggttttggcaatgttttgtggatattcttcggatgcatggttgctggagctgttgttactttaattttgcctgaaactgctaatcgtgatgcggatttgattgatcgtcttgaaattgctgccatgcaacaaggtagaacttctattatcgatagaagcgagaagtgggcctggtggaaacatggcatttaaagcatttccgagttttgcttatatgaaagccatacacttaggtgctttagtaattttgctggactaaattagcccttttttttgctaagggataaacgggtttccttggttctctacagaggctgctttgactaatctattagtattcctattctgctcgcgctataatatttcggcgtgataaaggtgttatgtgctcaggtcagtgttagagtggatcgttttgatggctaactcgacactgtacttattattattataggttcaagattacacatttacggttccagccttgcagattattgtttgaatgcaaagtatggacaaagatatgctaccttttctattttaaaactcgtggaatataattgctttcctggttttattagttcatttcattccctgttaacttatagaaaaaagcctcataggcaaaatacttctaacatgcaggggcttatgcgtttagttgcttgttgaaggactttacggatttgtttttgccagttttgaacattgtactgaaaagcagtgtcgaaacgtaacaaaaaaaaaatttgggatttttttaaaaattatgattggggtttaatttagcagtttcatttagttagcttttatgttaaaaaatttgatgtttatttgtttcattttatacgttaaaagtaggaatctaattcagtaaatatggggcaagtaagcaattcctaataatcagtaattttttataaactatatattgatatatatgtttttacaaaaactgtttttagacgccttgtttaatctgatatttacaataatgtttttgttgtaatctttaaatgtgtagcacttcctgtctacgaaatatgtactccagctgaggtttgctatatctatgagcgcagcttggcggaaaaaaataacgaatgcccatcgaaacgagtgtttacaagtttacagaagtcttctcagatcttgtgatgaaatacaaaatcgccctcttggggaaaagctctcaaaaatagtgaaagcaagaacacggcattatcaaaatgtagggaacgcctacaaagccgaagcacttttaaaagatgctaagaaagtaaggatatagtaaattatagtgagaactgtagaaaatgaaataactaaagctgatgacttagcaatgcgagactctcaagtcagcattaaacggtaaattgcctgaggtaaatatagaatctcatatgctatctaagtatcgaaaatacttaaatgaaggtggaaaacaaggagatgttgggataacaaaaccgcatacgaaaacaaaaaagctaaagtccaattcaatatttaattatgtgcgcaatggtgaagtgctatatcatttagtaagtactactggaggagatacgtttttacgccccaaattctggcctcaaagtcagagaataagtggaatgttaaaaaaaaggataactatgaaagagaataaacatcgtctcatccaaagcatgagctgtatgctacgccatgctaaacttgaagatgaatttatgaaggcatacatttcagaggaggatgttgggtatgctgatgagattcataaatgcatacaaatggttttaagtgatctcgattctatttacaaacgagaatcaaaaaattggcatatcgtttcgcaattttacaacatgcttgagttagaagcagctagacaaaaactcgaaaatagatatctaaacttttggaaggtatctcgacgctcttcaccttgatgtatttaattctttaattagcttctgagagaagtttacgacgaatatcataattattattattttgtatatatcaaacataaaaaaattttagaaacatacactcgccttggagacgtaataaagttgtaaagcaagcaattcgtgcattgcagttcttaatcgcggcagtacatatacagtagtattcacattgtgcttgcgaaactcttttcccaaaataacaagcttaaaaatttacatggtatactttgcggaaatacaacaatcattagcccaaccgtcaaactacgaatagcgttttctatttgcttatatgatctgatgttagaggagaaccttgctgtttttgagaactgagccattggtcttctatgtcctgaagcatttgtaaatcttggtcatcaaacgaaaattcttggccctcaatgtcatcttccaacgtagcaagtgatgaagtatcatccttcttttccgctaaaccattgttttccagggattcctgagtagatatttcgacatcattatcatcctcattatctgtcttctcttcttgttcttcccttacccttctttctagtgattttttgcgatctatagtttgtcgtatcacgctcaccaaactagaaacccgtgacagcttatttgcagtctctgtttcatcttcataggagctttccaatgtccttgacctcttaagtcctcctatattatttaatctctctttaaaattacttgacgaaggaacaggcaatgaagatgtccgttgaatagtggattgtgcttttggttgtaagcgatcccatagcttatgaaaaggatcatgcttccgagtagcgctactagtactggatttacaaaaaagccttgagacatcatcaggagacatggctttcgcttttaaaggagaaactttccatgagacgcatggttgtttatttttggaagaatcttgcatcctcaaacgtgcaatgagttaaatggtaaaaatatttttcagttcacttttaaagaattaaacgagtgatccagttactctaagatgattacaacgtttagtatcagaatctcaggtaaggtctccagacaaaacgaatactgcctgttcgacaaagatcgctccacacagtatctgctagcttacaattattctccttctcctgttaatttagcagttgaaacacaacatgtaaacaatagcaaattacgcggtcgtttaggttaaagacatctgaaggtcccaaaagttcgaactttttagtaactactggttacctttatccaagaacaaaactttctttaattacaaatggaatatgaatacgggtccgtggaatggggaattttagaaatgttcaatgattgtaacgtaaaccaatgttaagtaacacctgcaattatgtgacttttccatcaaaaaactattaaatttaaatgaaagcgttagaaaagaatataagtttaagtacaaattttatgagcttatggtgatattggatgacctacaccttaatatactaacaacatgtctactcgataaatttttttatttttacttaccaatgtaagcaaatgtttttgatgtaaagcgaaactacgcataagaactgtactttttcatttggttgttaaaaaatgcaatattacttttcattgactattccactaggcagataatttttttcatttctgctccaagacaatagatatgccagtttaaaagatatgtatgataaaaaaaggtttacaaagacaaataataacaagtgagagattaaagcatcagaacaagaataagctgtaggcataaattaactcattctcattatatggttattagattcaacccaaaaaatgaccttccttgacgaaaaaaacgcaaattgttaaaattttaaaaattaacgcggttatttgggcattctagaagaataaaacaaagagcattgcggtaacacccaagccaaaaactaaagtcttgaaagaaaggataagtctagatgatgaagagatcgtaaatatactaccagtaccagtaaatgatctggcagaataagaaggagagtaataagaggtatagacagtggttgtggcagttgccgatgtagatggcatgactgtacgattgacagttggtaatgtaaaaccagacatcttcgaatgtggatacataatcaagggatatccgttggtcatactggcagtcaaggttttatcggcaccaacggttaaagttctgtgaccgaagacatcagagactacttcattggcagtgtaattcgtctcaacttcataaattgtaaggttgttggtaactcccatattattgaacatgacgagaacatcatttttttgtccaacatagtgatcaacagcagattcgatcgattgatatgtggaagtgacccaatccggatcctgagtaatgacaaactttctaaatgcaaccatcgttttaataacggtatagtacgggtttgattgatcgtaatcagtaagccaaagtgcaggacgattagcaggatcctcaccaccattgaatccctgttcttgtccgtagaaaattgagggtatgccgtcccaaatcaacacaaatgacaaagcccccataatctgtgactggtcacttgtgtaataaggaaatctgtacaaatcgtgattttcgataaaagtcaacattaaagtactatcatattttgaacagtttgaagccattacctcctggtaagtgggaataagagtgaatccagcaccagtagcagtaaaagagaagtttatgtacaactgcaaaaagtaattggtaactccaggaaggacactcatgtaactacacatagtatcaggatcataagagaaaacttcaccaacgctgtaaacacccgtagcatcaacgaaatcaggaaagaatgtgtagttcatcattttcacagcatcaatacgcagtccatcaaaatcgtatttagaaataagacttttgaaatgatcactcaaataggaagaaacgtctgaactttcgacatccaaatcggccaacaatacaccagaatcttgccaacaatccattacgttcgtctcattatctgtgatatcccaatcaataagacagtacggatggaagtagctctccttgttaaaaggattaagagatgaatagtcagcatctgctagcggaggagcaagtgccatagaattgacgatactatccaacattacccagatacccgctttatgagcagcagtaataaggctaactaaatcatcttctgtaccaaagtgttcattgagggactcataatcagtgttccaatagccgtgataagcataaccagcaccgtcgatatctccttcaatatttttatcaatgggagatatccaaatcgcattgaaacccatatcctcgatgtaatccagtttgttctcgatacccttccaggtaccaccacaatactggtttgcatccggatcacatggattatccgtgcttccatcatcaaccgcgaaacgatccgtcaaaatttgataaataatacgtttgcgccactcagcattactaccagcattagcaacatgaatgagggcgcttgaaagaaataggagaacaaaataaacaccaaacatgctaaaaaaaggtatcaaggggtatttaagccaagacgactaaaagaaagaagtttgggagagcacaaaaaaaattatgttttgtaaaagttaatgatatgagccaaatcccaccaaaaagaatgacaataaaatactaataataaaggagtggaaattgtgggtcaagaaattatcaatgcagtaccagtattgaataaacaaaaatctatgaagaaagaaagcggaagtgcaagagccgactttacgtcgaatgaagggaccacgttaaaatttttcaaatgtacgtccgaattgacgctagtctccttagaaaccttcgttttcttgcaaaagattgtaaaacctgtttagcggtgtagtttgttgaaggatggatacgctggtagcaacaaaatactaggcgtaggtaaacaatctaatatatcagcgttcgaatccggctgccatcacattttatttaacccgtttagcaaatagatgaggtgcttaatcaacaataacgacgacaacctctgagcttcacgaatatgctaaatttatagcgcttcactaaatcgtataccggttcgcgctaaataaaaactgatgcttaaattcaaatttctgtgttagtaaaagagcagataaagcgaggataaaaatgtaggatgttgattaagactctaaatagagtagcgcagagaataatactaaatactgaaagaccgatcccgttaaactaatatcaaatccatagcatcaaacagaggtttgtattatgtatcctatgaactatcctcatcaataattgcttattataatataacataaacatatacaactttcgtgtaactagccaaggactactataagtaatatggtttattcatacaatgctagttcctatacctatagaaattcgtttcctgctgagcttattttaagctatgggtaagcgagtcaaaaaccaaagacgctatttgtaaaatggcaaacgaaattaggtattcttgttttaattataagcttaagagacatttgacatctcgttggtagtaatagaaacttgttttttaacttgttccattcgctttaatgatagctgcactgcccttggtactttattcttgaaactttttagattttttatatatcacaaagctttttctagttcaccattctcaattttagtgcttccttaatctaatagttggttttgtacgctgaattggtttcgcatttaaaagtgcattagtacgtttttgagaatcaagtataagacatttcaagtaaattgaaaaattcctgtcagtaatactttatatctaagtcaaatggtgtcatctgataataaaatccctcaacagtattatttatcaaacgaaaaatgtcattagtcatgaaaagcttcattcgcttatttgttttgaaattaagaatgaaagttatgactacatatcaattcattaagctgatatctttagtatgcaatccattattttataccatctccactttttgtaaatcattaaacataatatctaaagccaatttagcattattcaaattcgagacttattattttaagtttgtcttagaatttcatagtttgcaaactgtgtaaaatgaaatacgcatgggtttggcaattatacaaaaagctgctcccgagcacaattagtttaactagtaaactcatgcttttcgaaatggcatcaaagccaagataatttgatcatataaagttttattatttaaaagttcctatattaaaatactgctatagctcactctaatcctacaacctacatcaaactttacattaccttggtcacttatagtgagcacataccttgatcatacatatgtctgcacgatccatactctaatctgtggtttctgaaaatttacacgtaaattaagataatttgaagtaatttattttaaaataaaagattagtcatggatgaagcggattcttgggagctttatttggctcttggacttcccaaagatgtaagtataaataatctcatttgggaatgcatattttattaacatttcctttaaactctaggctacaagtgaccaaataaaagaatcatattacagactatcaagactgtttcatcctgatcgtcacactgctgaccagaaggcagcagctgaggaaaagtttcaaattatacaacatgcttacgaagtattatctgatccatcaaaaaaagagatttatgacaattttggagaacaaggattgaaaacagattggaatgttggatttccagggaaatcagctgaagagcttaaaaacaaaataagggagcaaattcaggaaagagatatccatgaaatcgattctttggtgcagagtcgttctgagactacgatagtggtcaatatgacccccttgtttgccagaaatattcgagttcagaatgctcttggtttaggtgctggtactagaatgctgaccccttatgaacgattttccttaatccagtgggtatcttttcaaattaaaagctctttctctattccaacatcgttttccaatgacctcaaaaagccgtctttcaattctttttcctcaggctcttttgatgatgaattttccgcgccttcagatgaagatgaaggcaaccataaaacatcctctcgtttatctatagtcactgaagcatcaatgagacaaaactcaaagcttcaaccttccatttttgccgtttatcattctcagccctctcctaaccttagttctgaaattggattttctcttttgaggccaggtttaattaccgtcaagtcagtgtacgctatcaataaccaaacttttattgtccctcttattcaaatatcgggtctaaagcgtcccccgcaagccaccgtagtcatcggacgacaaatcactcgctttggtactcttacagcacgctggaaaactggtgtgtggtcacttggttcttggggaattgcttcccctcgtggagcgaattcctcattttcacttacttggcagcaaatgaaagctattccaaatagtttggtccctcaactcagttggaacgctgaagttactgctggtttaatgtatagcggtattgcttacaactataatttaaaaaatgcaactgaggactcaccatatcaaatcaaactcgggacttcgatgagtacagtaggaggtcttcaggtttccggtgatacgagtcgtaaagttggccgttattcaacctttggagtaaatatttcagttggtgtcccaactggctctattacgtttagtcttaagtatgttcatttctcgatttcttctcaactacaaatactaatttttttagttggtcacgccttggtcaaaagatttctcttcctattatgtggtgtagtgtgtttgatcgttctgcagtcttttggggtctcgtatttccgattacttctatacttggagttgagcaatttttcctccgtcccaggcgactttccaatcagaaaagactgcgcttattacgattacaaaaacttaaggattctcaagaacgcaagaaagtttctgcaattcgagctgttaaattgatgaaggaaattgtagagaaaaaacagaaattggaaatggagaaaggcggtctggttattgagtatgccgagtaccgagtcgttaattgcggtgcaaacgaacctgatttaaagcaagatgtgactatatcaattgctgctttagttgaaaactctcgtttagctatcccttctagtgtttcaaaggtaaaactatgtcgcttaacatttcatttttgttttgattgctaactgttgatttagtcgtcaattatcggaatatatccattattttctgacaatgaaaaagaattggaaattgtttatacttttcatcagcagcggcatcgtgttgttctccgtgacaagcaaggtgtttttttgcctagtcgaggtatgctctcatataatcatattaaacatgtattaacatccacaagaacacaaaattttgtcttaaatgatacgtctttattaaacaatcattgtttacattttcgctaaattagctcctatcacatttttttgtttgtttatgttttggcatttttgagtataaatattacaacgattgatcaccgtcttcccagagcataaccctttcctttactaacacaagtaaatttatatttcttttgctttggcaaaaaagataatagcttgcttcaagggtgacttactgtcgaacttgttctcatctagccgggttgctatttgtgtcttaggcacatttcctcttttggaaattttgatagaaaatcaggatgaatataaagaaaaagagctttctctttcaatttttgttcggatggattgtactgtcttcggctcaatggctatcggttttggatgaggcagagaatttgaactcttctttttcattagaaagtgttgattcttttgctccagtaagaccaaggtttataatcgatgaagactttgctgaagattacaaccttactgttgatatcttgcatcgtccacttcaggaaaatttcgattctttctttccaaacgttgaagcgtatgttgaaagtggaaattctaatggtgatttgatgagcgacaatggtaaactagatgatttaaattctcgagcggcctattctgcccttaaagcccttcaaaactcttatggatcatcccatctttatcgctttacaccctatgaattgtttgggcaatctatttggattgaagaagcacctgaagtgaatcatgtcggttggtctattatgttcgataaccttggccgttactttttactagagttgcgcggtctacgcgaggttacttttgctttgtttattactttttcaatcgttcctattattacaggaatccttactgtttacatttacaagaagaaatactgtgtcataaaattcaataagtccggtcgttctaagaagaaggatagctggttgaaaaggtctaaggatgaattacttcgtacggatagcgcaaatcttctgactttgaatgataatgatgagcctgtaatgattagacattcatgtaaaaggacgtgcattcttttcgcaacactcgaatataacattccggaatggaatataaaaattaaaattggaggtttaggagtgatggctgaattaatgagtaagacattaaagcagtatgatttggtttgggtcgttccttgtgtgggagatatcacatatccagtggctgaaactgctccatctttggtagttaaagtggttaaccaagactatgaagtgaaagttttctatcattataaagacaacatcaaatatgttcttctcgactctcccatattcagaaagcggacatcacacgatccttatcctcctcgtatggatgatatatcttcagccattttttacagtgtttggaatcagtccattgctgctataatacgtcgtgaaaaggttgatatctatcatattaatgattatcatggtgcacttgctccaatttataatcttccagaggtcatcccttgtgcaatttcactccataatgccgaattccaaggtttgtggcctttacagtccagtattgatgaaagagaggtttgtggtttattcaatgtttccaaaaccatttgcagagaatacattcaattcggtaatgctttcaacctgatgcattgcggtgtttcttatgttcgtcgtcatcagtccggttacggagtagttggtgtttctaacaaatatggccaacgctcatgggttcgatatccagttttttggagtctcaaaaaaattggacaattgcctaaccctgatcctaccgacatcggtttgagtgttaatcctgtgaatcaacaacttcctgactttgcagaatatgcttcggtaaggaaggaaaacaagagaaaggcacaagaatgggccggtttgacaatcgatgatgaagcggatcttctggtatttgtaggtagatggtcagtgcaaaaaggtattgatattttagctgatctcgcgccaaccctcttagaaaagttcaacattcaattaattgttgttgggcctctaattgatttatatggtaaatttgcggcagaaaagttcatgtacataatggaacgttatccagggcgcgttttctcaaaacccgagttcgttcatctaccacccttcatttttgaaggagctgactttgccctaattccttctcgtgatgaaccttttggtttagtcgcggtagaatttggcaggagaggtgctatttgtatcggctcaagagtcggaggtttaggagaaatgccaggatggtggtattctgttgaatctagctcaaccgcctatttactgaaacaacttgagaagtcttgtactctggctctaaaatcaactcctgaaatgcgccataaactgagaatcgccgcccttcagcaacgctttcctgtagatgagtgggtggcattgtatgacagacttatacgaaactgtattaaggctcataacaaacagcagcaaagaagaagcataaaatcatttttcagttgcattacaccgaacaagcctactaaagatgttaacgatattttatccgaaaaaagtgcattttctcctgcagattatgagcactctatagatattagagaacatacatcatatgatgccaattcaatggataatgattctgatgaagataattatgaacaagcagaatcaattatttcatcactaagtagttcagcactttccgaattatcttacatatctgagagttccatgaatataggttctaggcttgatgaacgctttatcgatgcaaatggcgttgcaataagggatttttctgctgagttaacttatttgactcctgaaaactcaaaaggaaaattatctatcgatcatttcttgaacaaagtccaatcacgttggcatgacgaagaacatcactattacaagacaggatttaggaagcgtgtttacaaatatttaaagatcaaagacaaaaagtctaaagatgtggaccctgatgatgacttggtaaaccaacttcctttaaatgcttacacgaaaccccgatataagagtgcggctagtactcgactaaacatttatcaaagaattctatatcttaaagttttcacttggccgctttacacaatcttcctctcgttaggccaaattttatctatttcatcgtttcaactttctcttttatcaggatttgaagataataatcaaatatctttgtacgtaatcacaggcgtttttattctttcaacgattgtttggtggggtttgtatcggaaccttccaagtgttcattccttatcgcttccttttgcagtgtatgctttggctttcctgtttactggcatttcatctatgtcactaccttaccatattcgtggatggctaagttacgctgcgacatgggtttatgcaatagctgctgcgagtgggccattgtatttcactctgaattttgaagatgaacattgttcggggttgggatcttcgatcacacgtgcttgtgttttacaaggagttcaacaactttggttatcgtttctttggctctggggaaccttatccagtcgtttggactataactataaagtgctactacaacccattaatagtgtttatgttgtagcaggagtttggccggtatcattcgttcttctatcagtatgtattcttttatataaggggttgccacctttctatcgacaaaaacccggatcgatccctgcattttctaaatctttattacaccgaaaggtggtaatatgtttcctgatttcagtcatcaatcaaaatttttggatgtctacattaattagccaagcttggagatttttctggggttccaaacttaccaaattatggaagattgttgtaatgactgtatcctttttagttggtgcgtggttaataattttttatgtgcttcgaaaactttcgaataagcacacttggatggttcctgtactaggattagggtttggtgctattaaatggatgcatgtcttctggggaacttcaaacgttggaattttcttaccgtgggcgggcattgcaggaccatatcttagtcgtgccttgtggctttggttgggaatactcgattccattcaaggcattggcaatggcctaattttacttcaaaccttgtcaagaagacacgtaactaacacattaatgataagccaacttgccggttctgccacctcaatacttgcacgctttgtgtcgccaacaaagactggaccagctaatgtttttccagatttgactggatacactccagtagaccgtgcaaagccagtggctaatgctccgttttggatttgcctgatcttgaatgtagctctatgtatcatgtatcttcggtgctatcatagagaaaacattagcagaccgtgatgatttaactatttcttttattgagatcgtttttagtcttttttatgattttttttcaaattaataaacgtcatgttattgtactttaccgtgatttttaagagtagagaaaagcgtgtaatttaatttataatgcaagatatattgatacgggttaatcaatttacaggttgattttattaaataattcattttatgcactaattttatcaagttgcgatttaaattttaattagcatatgagttattaacaaccgcatattatttccatggtaccagaacacactactttttgaggaattcttcggatttgagaatatagctttacatacgaatatttttatttacttcaaacgttttgaggattaaaggacatggaatcgaagtcgttgagagagttatgggaagaaactgagaaactgaaggattcatcaagcacagatgaaaaaacaagatctgaaattgtggaaggctacgaaaaatgtttgaaacttgttctccagttacgaattttttcttcaaacgaagaagtagatgaaataaaaaccagcgaattacgatatttaatgattgattatgaacttgccaaatgtgtggaacaatggaccaaaggagatcgactaaaagccgtccagtatgcaaaaactcattatgaaacatttcttagcatttgtgatgattacggactaaaaccaatgcaagatgaaaaaccaaaaactgaggctgatacaaggactctaaaaatcgccagatacagaatgcgtcaaaaccttgagaaggagttaaaggctttgtctaaggactcggaaaccaatgaagagcaggagaggaaattttggctcactaaattacaaattgctgttgaagatacattggactcccttcctcatatagaaatggaaattgatttactaaagcgagcacaagcagaattaatgaaatcagaagacagtccagagaaagatgaggagactcttaggagagaggaacgaaagcaaaaagaaggatcttcttggcgtttggacttaaataccagggacaagattctggacaaaaataatcggccccttcaaccatttaccattgtatcggatcgaaatgagactcgaaaaaatgtttttggatttggctataatctacccaccatgacagttgatgagtatttagatgaggagatgaaacgtggtaacataataagccaaaaagataacccccctaagtcagactccgatgatgaagatgattatgaaaaattggatgcaaaaacaatgaaagatcgttactgggatgagtttaaagaagccaatcctcgcggtagtggaaatactatggtaaatcgtggttaaatgatttaactccctgatagattaacgtatcatggctttctagtaataagccagaatttgctggtttccttgatgtttctctctatttcatgagtctaagatatgatgtgaacttcataactaaattcagtttatggaaaatcgacttattaaattacagatttgttttttctattttacaaataaaaaacgaacccttttattttaaaactgttttgacgatttaacttaacctatttctctcatgttaaccactgaaagtcttttctgcagaaagcattcgaagtattggaaagatgggcttcaaaattagtaccttgaagtagaaacctttcaatcaacctataaaaatactttacagatgtttttatgacaattgaaatgcatattatttcatacagaatacgcttttatactgcagtgctgtattcttgattaacgaacatgaccgtctgaaatttttttagttggttcgtgaagtcaaaggtcacttggctccttataatatggttactgcaagctcgtctgttcgagtgagcaatgaagatgaatgttttatttatgacattgaacagttgaaggacaatgtggtggtgagctactctactggttcgtggagctgttttgacaagggaaccttacttgaaatttttaaagtgcctaaagcgcacacgaatattactggaatcattagttgcgatcagttgaacggcgtaataacttgtggctccgaaggagagatacatttgtgggatattcgttcgcaggcgaaatctgcagttcgatcgtggactcaacaatctaccccctttacctgcatcgccttgaataaaaagaaccagtttgcaacgggttcagagttaactcgttcgttggcttctgtacaattgtgggacgttagaagtgaacaaaagttaattagacaatggaacgatgcacataatgacgatattactcatttgcaatttcatccaaaagacaatgagttgcttcttactgggtcagtagacggtctggtgagtttactagatactactaaggaagaggactcgactgatcccgaagaagatcctcttttacatgtgattaatcacggggcctcaattcatttggctaaatttgtttctaagaaacgagtgatggtattgtctcacatggagtcttatgccatgtacaagcttaaacgtgataaagacgagaaaacgtggagcagtaacgagttatttagtattgacgacttgcgtgcagaactttcatgtagctatgtgattaacgaagtttcgactagtgacaaacagttttgtgcgttggcttttggtgatttttcgaaccatgaaactaagttcgttcttgtggatacgagtacaggtgagctgaaaaaagaacccaccaaattggaaagagcctcggaagaaatttgccgcgccatcagttttgatgtaaagaacgatgtttactatagcggtggtgaagatggattacttcaagcttttagagtctagtcattttgaattgttataaatgttgttagagttgtatgcacgagcgcatttcttagttaaaggatggaaaaattcgaagttatttaatataactagctctctcattccaagggaaacggtgctgagatgatcatttgttcatcacgttgtttatgaagatgaaagccacttcatttcattttgtttaacgttgtttgcaagaactctccttttaaaatcttaaaaaaaatctctccttttttcttagaattttgtttcatacaggtacaatggctatctctgtttttgttgtttggtctgtttaggcccataccggcattttatttatttttttttttttaataacgagttttattaagaaaacaaaaaaattagtacacgaattgttctagtgtaaggaaacaataaaaaaccttacgaggtatatgtaaagaatatgtattgagtcgataaaatgtaagacatgagtatgcaaagtattcttatcattccaatctcactgtattttgtgctcttttaaatcctttacagtcaacgttactcatattatcgctttcatgttgaagcaaaagtcatcgtagccaattgaacgatgaactattaccatcttatggtgaaaataatcaattgtggctttcttgttagtaatacgttcgttttagcaacattattccaagcatatttgcaagtacattcaatgtatatcgaagaagatttaattctgtttatcaaacactgtttactgaatacattgagcatattttaaagtaatatcgtccaggacactatgcctgagtggttaaagggacagactagaaatctgttgcggtctccgcgcgcaggttcaaatcctgctggtgtcgaattttttatttttataacgactctccttgagattgcaatgaagaccttttattcatttaacaaggatgtactttagttgtagaaaagtactctttcacattgctgcttgcatgtaattgttgcagatggagatggttgtatacgcttctttattagtactcaagtttaaattggaaatgcggtactaattgagcaaatgaaaagtactaaaataatgtttccataaattttttgattccttaaaggctttattttcatactagcaatttataatttttgaatggatataatgttccctaaggagatatgccttaacctcactagcaatccaagttaactaatactttactattcactatatagtaaatatgaatataagtttaactgttatgattaagcagcagatcaaatctgaataaatgaatactatacgtgttctctaagatttctattgaaatgcggaaaagatcatccttagtcagtagcaagccgattgtggttgtaaacaagactagcaatgcgctggtaaagatatatcacctttcttaataagctagcctgtaatttttttttttattaaatatataatcgcttcttttcatccactgttagcatatttcaagttatataacattatcttaataaaaaaaataaattacgagacatggcattttttgccatccaatatgctaaaaattataacgaacgataatctatcgctaattatgattcaaggttggttaggaaattcacattttcaaacgaagcattttcggtgggctttttgaggaaattacatggaaaaaggtcggggctacattatattatacatataatttgttatgaaaggatggccaagtcaaggtttgaatatgtgaagcaatacgaaagattggatcgtttactacctgagacttatatcgtaatacgaattgatggcaaaggattccataagttcacaaagaaacatgattttgagaagccaaatgatttgagatgtctaaatttaatgaatgcagcagctcgcgtagtcatgtctgagttcaccgacatcgttttagcttatggtgatagtgatgagtataggtatgcatgaaaacagaataataagctcatgaatcgaataaactaacctttctgcttgaagttttgtttggtctaagagtaccgaattgtatgaacggcgcgagagtaagcttgttagccatgtctgctctttatttacatctgcttttgtcttcaattggcctaaacattttgacattccactactttcactcccttcatttgatggacgagctgtactttatcctaatatgaaagtattaagagattatttgcattggcgacaagtagactgtcatattaataacctttacaatactaccttctggatgttaatactcaaaggaggtttcacaaacactcaagccgaggagtacctaaaggtaagtagctcatttttttttatgtaaaccctagcgatttatcttcctttcaataaaaactaaccactttcaccttttgggtgaattactttacagggtaccgtcagcgcagaaaaacatgaaattttgttctcaaaattcggcatcaactataattttgaaccagagatatacaaaaagggctcgatttggattcgtgaggtatgctcgacaaactttgtttaaattaatttttgcttacttatttaatttagcctattgatcaagaatggcatcaacaagacaaaaagttctccgtaaaacaaaagaagaaaatggttttatctatccttcacgtaagtctgatagacgatgacttttggacttcaaggccatttcttgaggtattgttacaataatttcctttcacacatttgtaaattatgggtcgtttgaacaaaaacattatcactcgtttaattgtttctctcatgcagtcatcagctctaggccgtataaaacaaatctttgttttggaaatcaaaaaagtactagattcttgccttgatacgttaaatagctgttttacttgtttgaaaaatttaagagaaaaaaaataatatgcacgaaatttgaatagagataaacctcaataaataagagttaaatatacgggactatcaaccctatgtataaaaaaagcaaaattaaaaacgtctatattaaaaagttatataaataatatggtcataacaacgaattcataacaaaatttagactcagagctcagctcatacaatatgcgaatttgttcaataaaagggcgaaatcgtcggtgttcaagcaagattgggggcaagtgttattttcgcaacactttctgttactttgttggctacattagcctggatttgtttcgattgtaaaagttcttgccttttcgttatcaaagcaatcaaatttcttatggttactgaattattggaatcgttagcaccgtctggagtcgaaaaattactctcaagaagtgactccaacaaatgtgctgcaagccggtaattttgtaaacaagcctgtgcatcatttcctgacagttcactagtggctgcatttctggataggtccaatgctctatgataaattaattgagaagctgacacaggtttggtagttggcaaagaatgtgcggcactttgagaaataataatttcacgtaaaaattgggatttctcaagactttctgaatacctttgacgaaaccattcaatggcttgttggcaatcaggagatgcacgttcttcagagttggcccaaaaagcagcaacaccgtcaaacgccacttgtaacagctcaatgtctctctcataaagtacatacgattccttggctaacataaccaatgaaaaaggagtcaaaggtctatccaagagtgtatctccaggcttcatttcatcagacaaagaaggaataatttgagcaagcttcacttcagccagatggtagacagagtttgatttcatcgctatactttctaaaacatcaagcaatcttttaccggtgtcaggtaaggaaggttggataatgttgacattgttatccaaattgctttcttttgtaggaagggatgtgtttccattatctgtcataccatccactacaacttcattaagcctagcgtttgcaacatttagtgctcgttctagagcgcttttatttcgcgcaccacctccagattgaggtacatgtgctgtagcttgctcaaacgcacgacgtagttgagtgactggggttgaagcaatgtaggtaggattagaagggaaagcattgggtttcatgtaagggatttgcatccggctagtatggggaaacgcatgattatttacaggagcgctttcaggagagaaactaccttgaaaaacaccttcgtttggtgaaggcgagttaccattgattgattgctcgtgggttaggctttcattggaaagttgggtagaagagattatgggatgatggtccactacgacataggcgctacttttgttcgaagtatcacttgtcaacttagcaggagatgccatgggtataggttgcttagaggttaatcgaggagggaaaatgctagcagcaggagcactttcaggaggaaacacgggggtgtatggtaaagtgtttccatcttgtgcatagcgatgaggcacccttcgaccggtaatttcagagggctgaatactagacccctgagcttggaaagcttgacgcaacaaaccgcctggaggagcaggagcgccaggattactttttgggaaaaaatcggttatgtaggcaggactagaagatggaatgtttatttccttaaccgcatcttgaatatcgctaccggtcaaagtagatgcgtcatctaatggagtagtgacaacaatactggaaaagaaaccgtcgtagtcgatacgatcagccggattttgcttcagcaaagcacagataagggttttaatgtccgggtgaatgaaagcttcttcaggaaacttgatgacatctttagctttttgaatcctcctaagaagttcgacatgatttggggccttgaagggaggctttccaacagccatttcgtataacacagcacctactgaccacaaatcggctttagcatcatatttctcgtaacgaagtatttcgggcgccatatacaacggagagccacatagagtttccgccatactagacgtttgaaggtaacgtgcaaaaccaaagtctgctaatttaagcattggtagcttgggacttcccacaaactggggatgctcttccagataggcagcggtgggtggtggttgtaaaagaagattttggggtttgacatctcgatgaattaaagaacgcgatcgtaaaaattggagtgcagaagcaagttgttgggtaaaatgccgaaccaacgtctcattcaatccagccttgtaaactggcggatgatcgatgttgatccaggctaaggagggaatactgttaaacttttctcgctttcgaataaaataactcaaatctcctagggagcaatactccatgaccaggtgaatgaaccgcccagccttaatacagtctatcagttccacaacatgcacatgacggatctctttaaggattgaaatttcactttctaaattctccaaaagtttcttagtaagcttctttgtcaatacgcttttaatagagatcactcgattcgtttcctgcaacacgattagccaccaaattccattgaaacagacaagcagttgcttcttttacttaccgtgtgctttcctttatacacaattgcgaaagatccacgtccaatttccgatcgaatgacatagggaccaattgtttgatttgtactcgtctgtaagttcatacagcttctggttcacgataagacaggtgtaagggttttagctgcctttatactcactttgatagcatgggagttggcaaggatagcgggtcgccattgataatatagctgcgtaaaaggcactttccgcactgggctttaataccttaaaataaattgcgatcgtggtgcggctgtaaaaggtaacaggagatatggtttcgggataacaagttttatgggagtaagcactatgaatagaatgcgagtttatagaggaaattgtattaactcaatgaattataatattttacacacatatacctgctggtagtgtctaaattctttgaaattgttccctttttgtgcagctgaaaaatgccgaaagtgggttaagacgaaataaatgtgttaatttttgccatgtcagttaccgatttgagtacggaaagcaagtgtgtgtggaattagaggataagaacggaagtagataatactccagacgaagcgtagatacccgcgaaaaggcaaattagttggaaaaggcgattgtcatggatagagtgatcgaggcagatgaaaatgcaagtgtaaatagagggtaaatttggataaaaaaccggcggcagatgtacaacttgtaccactgtaccagtttcatgccatatagaaataatataaaaaaaaaaagtaaactggatttaaaagacaaaaaaaaaagaaaagaaggagcctacagcaccccggattcccatgttgtctccaaccatagtactaacgaggccctcagacgcttaactgcagtgatcggacgggaactggtgttttcgcctaggtatggccgtagacatttgttgtgttaaataataatatttatggttgaagaaaagaatatcattttttttatgcagtgtgagttttggctcaaacgcatgtatataatactacaaaacagggaattgggcaatgactagtattcaaacatgccctgaggacttgaagaccataatggaaggtaagaactctcttgcagaaaattaaaagaaaatttccaatcataatatgttgcttttctctttattgatatatacgagattggttgtggaatccaaatttctaaaacagactttaaagtcaacattagcgaaaacgctactgaaaacaagcaacgttataaaaaattcaccttctcaccatgaatagtttaattttgtatttgcgtgataataaaataaataaattaattcgagaatataaaataaaaaaagttttgaaactgaatataagtgcttgttgccaataatactgcaatgaagtttgaaacaaaaaataaaaaaaaataaagtaaaaataataagttaatcaaaattttgattttgtagcaataaataaattaatgaatttttttttaatctattattttctaggaaatttggaaaattaataaatggaattaaaatgcttatgctccgagtcgtacactgtttaattaattttaagcaagcaaaaataatatactgttcgtttcgaagcaacctattctacttaaaattgtgccacgatatccgctcagatactcgttgttatacatttctcaataaatgaatattttgatcttcctaaatatgcgaactgtaatagtcaattacctttaaatatatgactgattgaatagcaaaactatatatacatatattttgtaatatcatttttaccgaaatttatagtccgttttagttttattcgtttcatagtcacatctgccatcttttttttgctcacgttggttttttgtaaacagtattctcagtggatgctgttgttaaggtgattatgatttaatgataggcctggcaatacgtaaaatttttctttttattttattaaaggaaatctatttacgtcgaattagtaacaaagagaatatgcaaagaattacatctttggtttattttttcatatataagcacatatatgtatttttcttttgtttgtcatttgcaaagcatcagagttatgagatattttactttgatgttgcaaaatattttatggaattaaacattcttaatccaaggcttgatacaatacccacatgtacattggaagtatgagattgtcattctccgttgagacaccttccaaaatggccgtacataaggacataaacagcgttttccaaaacgttactgaaggacacacatgaaaagcttgcgtcaagtgtaaaacgagaaacactgagattgaaaaggcaaataccccctcaatacttttattcgtttttgagatcctatgttttccgaaccttttcccaattatgctagccatagaatctccacaccctaaacataaaacaccaaccagtaattcaaccgacgcaacaggaccttttaaagcattcgaaagccaaataggaattgcacaaccaattaaaagatatatatgggaaataatcaaggggcccttgtgatccctgttatcggtatactcccataaaaattcatggatcatttttccaaatggcttaagacgaagtatgcgtataccttcaacaaacagaaatatgaataaaactcccgaaaaagacaggtggagaaaatgaggatctaagcaacaaaccggaagaaataaaaagacaaccaaagcatgatatgtctttctacgaaagttcagcacttcatcttcagtggtaaagtatttgccaagtggattattacggttgcttcgcagaagaataaaaataaaacaaccaaggcaaattatccaccaaataattattttaatcctcgttagggaattcctatgcgaaaaaatttggttgaacaaccatacttcaggtgcttgtccaagttgcccagcaacccatgacctggacactaaaaatacgagcaaagcgctaaagaaataaattaaacaagtagtaaagagtgccgataaatgtaatttagcagcaagctttaatatgcaaaggtttaacaaaatgagtgtaggtaaggaaatgagtaaaactcccgatagcactgaaactacaggagatacttcatacgaaaatgtagcaaaacaaagacctgtaagtccggtacaaattaaaatgccttcaatgaaggtaaaactgttttgtgtaatttcaagaaaggcaaggatgaccgtttcgtgaagttttaaattaacactcgaattacccagtccatctaaaacaatagagagccatttccatctttgtgttaaggacaaaagagcgttgtaaagacataccgtgtacatctcatgatacaagacagagttttctccaaagccgacatagaggatacaaaagggaaacgatgataaccacaataacggcctaaataatgagttagttgacttaagtttaaaaatttaattgttcgtaaaatcgtactcatatagctggattatgctagacgaacccaataaataaaagcatgcaggtaaaaaaaaggacgcatttgaaatttggaggaactttttgccagagttgcataagaaaggaatgaataaaactgaaaatatttccaaaatactttcaaaattccgatgttgataattcacttcaacacattcttgctcacgatcaatcttttccgacgtatcataacattttttcgacattatatacattaaaaatcaacaaacagttagccaacagaaatgatgtttttcattaacagaggatttgctaaatagcaacaattgcaaaaaatcgttagattgctaagtactcttataaccaaaacatcagattctcaagtatttttattaggaaagcgttttttaaatgtttaagaattaacaacctccagtaatttcaactttaatcggtttagaggaaagcgtttgtaggaggtgttgatattaccagtaaagtactatatggagacaactgttacatcgaatattacgatcaagattcatttcaataagaaaattgaggatttgtttatatcttgaagataaactaatttctctctctcattaagtactacaataagttgagaacattgaaatattgaaactgtcagcctagtagtaaaacgttgatttgaaagaatgatcatagtttgtttgaatgaatttcataaacttgttgaaataagagtaaaaagaattaaatgaatttgtaaaacaattgggatttataaagcaatttaatgcgccttttctagcagccaaatgggtttcccagtcaatttttagaacaatttctgtaagtaaccagaaatgccttcaaattcactagaatctatatcgtttttattacaaagaatgaacattctttaatgtaaaatgaaccttgataaaaatgagccatttatttacattggatttttaaaacatatattgaattacgatgagtttggcaaccacgctatactgcaggtatatttaaaacacgattttgtcatttgcataacaccaacacgttcattgaaggattgtttagtttaaagacaggtctattcatttcttttgtattatttgggattgatatcctagaaaaatagaagaattgtgagtatcgtaaaagtctttttcttttgaagcgtgttcatgacagcgcaagactctataccttcgctggagcagcttgttcagcaaaaaagagttaaggaagagaaggcggcgagaccaaagtttttatccaaagctgaaagagctcgattggcccttgaaagacgacaaaaagaggttgaagaagcgaaagcaaaacagaatgacaaattattagatttaagaaaaaggacttttaccaatcatttagaaaataatgaattagcagatgatgaaaaaaaatcccaggtatcctctgtatctagcaataacagtggcacagagagctccgcaacggacgaagcattcagcatgaccattcgtcaaaggtacatgggtataaagcctcctgtggtaaaaaaaagaagaagaaatgctgataaaaaatttgtatttgattgggacgccacagacgataccatgaaggatgcggaaacctcggcatcacctgaggctacaattgctgtatttggaagggggaaattaggcggatttgatgaccagtcgattcgaaaagcgaaaagtaattctggtttgattcagcgtttgcttcaaggaacggagcaggataaggctcgcgcacacgagttgattcagcttcaagaaaaacgagccaaaaaaatagattgggacgatgtgccatggagggaaaagccattggaagccatgaaacccagagactggagaatcctcaaggaagattataatatatccattaaaggggatgatttaccaaatcctttaagaaattgggaagaagcaggcttaccaagtgagatgcttaaagttttgaagaaagttaactataaagaaccaagttctattcaaagggcagccatacctgttttactacagcgtaaagatttaattggaattgccgaaactggtagtggtaagactgccgcctttataatccctctcataattgccatatcaaaattgcccccattaaccgaatcaaacatgcatcttggcccatatgctgtagttttagcaccaacacgtgaattggcccagcaaattcaagtggaaggcaacaagtttgcggaacctttgggtttccggtgtgtttctgtcgttggtggtcatgcttttgaagagcaatcatttcaaatgagtcaaggtgctcatatagttgtagctactcctggtcgtcttcttgattgtcttgaaagacggctatttgttctcagccaatgcacttatgttgtaatggacgaggcggataggatgcttgacatgggatttgaagatgatgttaataaaattttgtcatcactcccttcctcaaatgcttctgaaaaggatgggtcaattcttgctactgcaaattcctcttcgtcaagacgtcaaaccattatgttcagtgcgaccttacccccacgtgttgctaatttggcaaagagctatttaattgaaccagtgatgttaactattggaaacattggccaggcagttgaccgcgttgaacagcgtgttgagatgatatctgacgatagcaaaaaatggagaagagttgaggagattttggaatctaatcgattttcacctcctattatcatatttgtaaatctcaagcgtaatatcgaggctattgcgaagcaattaaatgccattggttggcatgctgttactcttcatggcagtaaaagtcaagaacagagagagcgagctatcgaacagttaaggaataagacggctgatattcttgttgcaactgacattgcaggtcgtggtattgatatacctaatgtctctttggtattgaattacaacatggctaaaagcattgaagactatacccatagaattggtcgtacaggtcgtgcaggaaaatctggtacagcaataacgtttttgggaccagaggatactgatgtatattatgatttacgcgtgttattaagccgaagcgcgaaagcacatattcctgatgaattacggaatcatgaagcagcatttgttagacatgcagcaatcacccagtaaatattgtctttggagcataacattgaatgggcactttataatggcctttttgtacgttacactatgctgaaatatgatttagtgatttattataaagttttcttgtatataaacagtttctaatttaatgacttcaacaattgaaaaagttagtttatttcttaaatccttgtaagtgtgcttacagcaagcaatccttagtcttagtctactgcatgtacgaaaattatttacaagcatctatgcattgtgtgtatttaatggataaaatttcgcactaataaaacgtacagaagaaagtacaccctgcttgtatacgataagagttttacttgtacaataaccatttaggaaaattttgattattgaaaatgctcacaagctaaaagaaaggatgacagttcaagctcggatatccacaaaggctgagcaaaaaaaggcgagtataatcgttatcatattgctacgaacaacttcattgaagtttccattccgaagggattgtcagaaactggtctaaatcatgcctcatgaaaaaatgtatcctaatttaattttttaaaatttcgtagcaagacttacattaaaatgatgaaagaatctagatgaaaacgaaagatcgtaatcgtgaaagtgcttaatcttggcgacccttaacaagtcgtttgatacatttgtctgcggtgataacataaacgacacagccccatccactaatacaatcacgatcttgggcgttaagtaaagcttgggagatagtctcaaagagatcgtcaggctctaaattgggctcgtatacagactcacacataccataaagttgttctgtagcggttccagaaacgatgaaatcctctgcaaaatcgatgcatccaatggaatcgaatccacagataaacggggtattgtcattagatacaccagcaactactgggaatgagaaatagggaccaaatcttttttcgtaaagggtggaagaaaccaaattagcaaatgtcttgggttgaatttgacgctcttcgcggaatttgtaaaggttcactttgtaccgaaataactcataaagcgtctgaacatccgtagcaagacccgtcagtcccaaatacgttttgtcacccatcgcaaacaccttaggaaagttgttggtcaaagaaattgactgaacacccaaccgcaagtccgatgcaatagccacgcagtttttacctgccatggctacgcatgaaccaccattatattccataatactcattttgtaggattcactgtttgtatgaggaaaggttcttgctgacaaaagaagcacacgaataaccacagatgatatgttatcgcgagcgcacaataaccaaataccgtattggataggatgcgatagtttgatttaccgtatgtttagcgatgcaaggagtatatcgtattactagagcccttcctttaaaaaatcactattgactttttacgatatccataataaagaggtataagaagtgaaaatgatagatcgtaaagttcacaataaaaaggtgttcagaggtatcacttagactattgaataatatttaatgagagaagaataagtctccctgaaatagcttcctctaacgagaatgttggaatggcactagtgctgctacgctttggctgtgccatactgccacgtcgtagtctgtgcattaccgagcgatcacattttaaaggaatatcaagcgaacttcaatctaactactttggcaccaccagcgtagcaaatatcttcaacaaccatttcatcagtctctgcgatctagcaacagcaagatagcttgagaaggaataacggcgcacatgctcgacatacccttgtaaaaactcaataaaccgatcatttcattttatcagtgtacattaaactgcgttagctgcgctttagaagaaagtagtctaagagaattaaaagtaaataatgccatatagctaactcgatgaaggattgttaggactgtaatcatacaaccatacaaatgcaagaaatatcgctatagcgggaaagacaaaaattgggttaaaaaaggtatttttaaccgttcttttgttgtttattcaaagtcatctttatcaaggactctaaatccaaaagatataaataaacatccggaagtgaaaaatttgacttgagcttcctttcaatcctatttgccaaagaaattcccatactttgtcttctttctatccaacactccgataagatatcgcacataacatcgctaattagcataacacaaattaacctatcggtatctatataacgtggtataacccgtccctatgcgatataccacgtttattaagttcgttattcagcacaccgaattttgcaccactgcgatatttgagaggctcatattgctgaaatcgtgtggtatacgtattcctccaactaccatgttcaaagactactatgccattctcaacatcacccccaaagccagtgctgaggagataaaatatgcgtataaaaaggctgctctggagacgcaccctgatagagtatcgcccagtgctcgtgctcgagccactgaacaatttcagctggtgaacgaagcatactacgtcttaagtgacaattctcgacgagctcagtacgatcgtgaaagtgcctcttcctctgctaaaccaagacaatcgtttttttcccgcacaaaccctcaaccccaaagtcagagtcaacaaggagggccaagttttggatttcgccaatccttttccgattcgcaattcgagcaggtgttcaacgaaatgatgaatgagacatcgaccagaggcattgccaatgccttttggaccatcgtaggtacgttagctggtgcggcgttgggatttatcacgtttgatgtgcctggtgttcttgtaggctcggctgccggtgctaaacttgggcgaattcgtgacacccatggaaaaagcgcttacagcgtctttcaagacatgcctgcagtagaaaaagctcgcatattaacccaattcctctcccatctccttaattcttccaagcagttcacctcctcctaaacgcgtctttttgtttacgtgtcgcaaaatttattaaatcagttacgcgtcgcgctttccagcactgtccacatttggtccaatcagtcgcagcccgtccctttctcccatgcattttcggctcgtccatcagagcgagttcgttgatgtcatgtgatgtcatgttttgcaatgatgatgtaactacttttcttagtttctcataatgaaaatcgctccttctttttacctaactcagtcttaatttcttgaaatattgaagtttgacgagttttcaagcttctgtcgtttttcatattattttagggacgaacaactttcattgttgctcgacaagatccatctgtcgccttggctggtgtctcgtagaaaatttacctttcccgggtttattgggctgaaacgccgacggatttgatctgttttccaaaaatctttttttgtttatttgttttactctaaaaataatagaggattgaaagatacataggcatcacagtactctaatattattttgaaatgagtactcttgggaactctactgttaaacccacgaacgcggaatttcccggcctccatgctatggagcgctacaaacccgccacgtcggaaagcctctatgtgaagggacattacggtccccatcctcataaagaacatcctgccgcttatgttgctgcaaaaactggttttaacgccacttcgagaagacaatcggtgcgtgagcatcactcctctcatgagggttctgctcaacttaaccccgatcgtattttgtatatgtctgctggtgcggttaccgccgctgtccctaataaggagcacactgataacgttacaacttctcaaacgatccgctatgaaacttcctctcaaccttcgcaagaggtttatcatcctcacgctggaaaggctgctcaatctgcccatgtcatgaatagtacagaatcacgcccttccagtgctcacgtttcctcatcctatacgcaaaagccctttgcctttcccttgggccctgtatttgctacctcttcccaagcagctgcctcggaaaccgcccttccttcgggttatgaacccgatgaagcccggttcattggtgcttctcagttagccaaactgtctgcctcacatgctcatcagactcctgctcaaactgtggatgacgatgtacctcttccaactcgtatggctgcaactgagcttgtcggtcatattcctttacgtgcagccaattatgcgaatgagtactcacaggatgtccctgcctctacacatagggctgctagcgagttggttcacggtgtccccatgcgggcttccggtatcaatgatcccaagcatgatctcgatgctgctactcgccataatattaactctgtggctgctgcgtcctatgttgctgctcgttcccgtgtaatagaggaagaagaagaacctcctaatgaggtgaaagagcgtatggactatgaagcggacgcacaaaggcgtatccgtaaaatgaacgtctttggctctgctggtgctgctttacgggaaagaacccagcaagatttaatggcaaatgagcaagagcatagtggtgaatttgccgggttttctcgaaaccttactaatacggccgcggctcccaccacttatgaatacaagagacctacttcgtcgtataccgctaaagatgccacttcgaaagtctacagatctaacacttacaagcctaaatcatctgtgaatggttcggtctaccggtccaagtctgttaagtcaacaactagtcataacaaggtacctgagcgtaactcggttcctgcttataatgaaaaacttatgcattctagtgctgcaaatgccgctattctttcacataaaaattatagccctcctgttcaacctactcgggatgacgaggtctcgcaggaggatgcacgagtaaaggagattgtacgtggaatgaagcttcccttaacatcatcttccttgagcgcagcagcgtatcggccgatggaaaagcaagatccagcgactgttgaaaggcaccacatccaagctgaagctacgcagcgcgtaagagatatgaagcttgatttgaccaaacttgaatccaaaacgaatgatgaaattcgatcctatcgtcctcgtaacgtagtgataaagccgtacgccgctgctacacctccaaagaatattccttccacatacagggctcctcaggcaccttctgtcttaagtccagtagtcactgcctccgagggtgactttgagttagatggaattactcctgagagacagcagactatgactcgatccacctatcaagaaagctcccagaggcctttccatgaggatcctttccgtactcaccctggcctcttgcaagctgttgcacgcaatcataggaattctttagcgaacattgatgaaaggataatgcgtcaaaatcaagcagctactgccaataccaatactgtatctgagacggatattgaggctcttgagcgtagactatcgaaggcctatcgtatggaagcccaagaggaggcatatgctattaacattgggggtggtcgagtcatttcacctgaagagctggaagagatcgctagacgtaatgttgatcctatggtttccgagctcagtgagcgtgcagctcaagaacgtgaaagaaaggagcaagctaaggaagcaaagagattgaagaagcttgctaaggaagaaaagcgtctgaaaaagaaagaagaaaaagcgcgaaaggcagaagagaagcggttacaaaaggagcgtgctaagtacgctaaacagatgtctcgcgaatctgcccatgccgatcaagctattgcgaatactggtccggtagcaccgccatatttcgagcacgagacagaaccttctcattacgaagaggaagaggaggaggaacctgaagagcgtagagaggaatcatctcatttcagcgaatcttccggtaataacgagtttgaagaaactgagcaagagtatacccatggctatggcaatgatgtactagtgcaacgtacggatgttgtgaataactttggagaatctagccatgcccatgataatgctgtgaatgaaaagcgtgatcttggaagaaatggttttggagatgttgatgaacaagatgctactgaagtctataggcacagtatcgagcgtattgttcccggcgattatcttcatgacgagaaaaccagagatactcttaccagagaatcgcctgccttccgtagcgaagaagcagttgttgaggttgcagacgaagatcatcctcatgcttcggaagctgaacgagctcactcgtatagcaatcgcaagcaggcctcttcggaatcgtctcctgaatcacagtcaacccattataatgattatgaaggtactgaggacaatatcgttcgacagactaccactgtggatgaagatggtcatcaagagcaaacgacatcgacaaccaaggttgcacatccaattcctgtttccaatggactcagttctccacctcgagagcgtctggacgataatgctaaagagattttaagtagatcatcaccaaagtcacccgttgcctggtttaagcgcaaatttaaaaaccgcaaagacaaggctgccgtgaagcgcatgttagaggaagattcttcaaaacagctgtcttctggtcgtgatgtggttgctccaacgtctgttaatcatgatgtttctcatgttggtgaatctacgaaaccagctgttaataactctacgaaacccgtagcggttacatctaaaaatggacatagccgtaatggttcgcatgctgcccattcgaataatgtcattggtactcaaccccatgtaaatgtctcagctgttcccaacaccggcaaccttaaagacgctttagagggatcagcggtgtcaaagactgatgacgttgataatgtggtatctggtcactctaatgttaacggtgttagtaaatcgagaccaaacattgttgaaaggtctgaagattatgtgatcagccatcttccggagcagagtagagcgccaattggtgccgctttccaagaagacttgtaaagatgatcggtgattgggacattagttgaatttctataaaaggtatatatgatgtgaatttgtgtattgtcaacatgagattttcaaagagtcaacttgggtctgttttaattcctgaatcagctaatttacaccctttctttgatttgatgaagccattgaggataataacacaacctttataaaccttgagggtgagaattgacctgattatggatccatctaaaatacttaacatgttgttattatttattgagcaatcctgtcttttgtgcaacaaagttcctgttattacaaatgctattggattataaattgttttactttgttgcttgataataatgctaattataggacgttaggatttgctcaaaagtattattggtttatgtttagcatgaactaaattataaaagtatatgtcgttggtacgtggcttgctgactgcacatactttggcatggctgctatataggctaaatgtttattttacattatggatttgtacttactattgaattgaaagtgaattattatatttatgccagttgcttgtatatatgtaagagtctagcgttcttgacgaacaaggcagtaatagagctttgtagtcaaaagaattatccattcaaattgatgtaacgaggagagtgaagtttgcagttgaactagttatatcccatcaaagtactcagatgtacagtttatgtattttactctctctatatataatatatgattgaatgcaagagagtactttataaacagcattcttccatgtaattattacgaaatgcaccgttatatggcgtactacgataaatatcgaaggattacgctatcttttattagtcatcaccgaggagttaagtttgcaattgtagatggcgcagtgcagcaaatgcgtaatacgatgtttgttgacaaaatcattcttaccgcatcaatggtgtgatgtaacttctacagcattttggtgtagagttttacatataagtagtttatccctttacctatcctactttaaataccttttattcaccaaaccccaaggtagccgcaagacagcatttgggataaaaagtgaattatctactcccagtaatatcagaaaatttctggcttgtatttattcggctacacagtgaacatattgaataactctgtaaaccaacaggttcacttgaaaaaaagacgcttttaaagtgatccatagttatcttttgtttctcgcataaccagtgcatattcgcaaggttggtggatttgtatagttgcggagagcgcaaaacagttgcattccaaaaattttcaaatacctcgagtgtgtctgctccaaataacactatatcttaatattttcttggatagtgtacactcagttgtttatttgaacgattaaacggatttgaggctttggtcgaaattaaaaaacttaatctttccctttagcattgttcggtcttaaacttattttgaacataatagatgcaagcagatcaagacaagttgcattgaaataatttgtatttatcttatatatttttcttttcttttatatcaaatcaccatattgattaaataatttctttattttacttttttttttatattttttaaaatatattcattgactgaatatcattgatttctaaagatttcctatttattatttttattatttgatactttatctttgcgttaaaaaccagatcttttggaccctaagatggataacgattatactacttctactaccacttccagaagacccagattctgggggttcttcttcatacttttcccgctcgtcagctttttaatgtggacaattggactgattgtcttgttgggtctgtggagcacccaggataaatggcatactcccagtgaacctgatcccgtatatcttagtgatatgggtgcttacaccaagggatttttcatacccatgtgtgttatcacgggtgtgttttactttttgacgtttataatgattcgtcttgctcgacaatggggctggatatacccaacgggtagaaaagttgaaacgtatttaggatggtttgcggcactaacaggtgctgctgctgcctcatgtctgatttccctatccattcgtgatgatgtgcaccacgataatgttcattggaaatttacagcagcgtttgttgtcttggcatttgtttccgccgctagcaacatttttgaatggctatcagccactcgctactatccacagagcagccttttaagggtttcatttatattcaagtttgtcattattgtcgtaggtatcatttgcgccattgcattcggtggtcttcatcacaattaccgtggtcgttcagcacgctttgaatgggttgtgtgttttttatggtccatttacatttgcttattatgtcttgaccttgcacccgctttattttacgattcattagccagtgcccccgatctcgaaaagggtgcgtatgctacatcggttcccgaatcctatgtggctcccatggagcctcctgctgctgtattaccggatggggaggaacgctatgctactccagacttggtccctgataccactgctcagtatccgtatgccagtgccactgaacccggtgtgtcaaatattcctgaaaccagacctgagcgaccagtcgtttacaacatggacgtatcacaaacgacaacgactacgagacctgttttggcatagttaccggtccacctggcttgatgaacctaacaatgggaaacccgaagtatatatattttcgagttttatgtacatatacgaacatttacccgccatatattataatttccgctaatgtatatttcatttgtttaacgttatctaaaaatttataattaagttaatcggatttgaagaattctgctttggttgtgtccatcacacatccctttgggaccatcctcaataaagctacgaaaaaagtgttccgtccttaaaaaaatttacttctttccattaaaacgaaaaaagcctatttcgtttctttcaatgttttccttttaggaaggcaagtatctgtttttcacatattttttttgcttcttttctttgttggtttctccaagatttagtccccaattggaagttacgttaatcagtttatagtccttcttccttattagaactaaatagtttacaaaataattcgcaatgaatctccgggggttttttctttaacttacctactcttttaccaacgtaagtaaaaattggtgtagcagttttagcattcttgttttctattatgttattccgtttactagcttgcgaggagaaggagtatagtgagaaatataaaagtacggtaaaaatatatagcaaagaacggtaaatttgtagttggaacaattatttactttttgactgtaaaaaatgatgctcttaaccaaaatcattcatggcgccaattggggagaaaaagcggtatgtaaaagattgaaacacatgaactaataattagctttgagttagaaaaaagcattgagcctatttacacgggaggtcctgttgcattcgactctaatgagaagattcttgttactgctttaactgatcgtataattggaacccgtagtgagactggagagcgtcttttttctataaaaaaggatgaggacgattacgttacagccttggcgataactagcgattcaaaaaaacttattgcggcttttcggtcgagactacttactatttatgagattccttccggacggcgtataaaatcgatgaaagctcatgaaactccggtaattacgatgacaatagatcccactaatacattgttagctacgggaggtgctgagggattagtaaaagtatgggacattgctggagcatatgtaactcatagttttcggggtcatggcggtgtcattagtgcattatgctttggcaagcatcaaaatacttgggttttggcttctggtgccgatgattctcgagtcagattgtgggatttaaactctagtcgatccatggctgttttcgaaggtcatagcagtgttattcgtggattgacatttgaaccaactggttcatttcttctcagtggatctagagataaaacggttcaggtttggaatattaagaagcgttctgcagtcagaacgattcctgttttccatagcgtcgaggccataggttgggtcaatggacagcctgaagaaaaaattttgtatacagctggtgaaggtaatcttattttagcatgggattggaaatctggttcccgacttgatccaggtgttgatactactcattcagaaacgaatgcaattatacaagtcgtaccattttctgaaaacacacttttgtctgtacattccgatttaagtctcttgttgcgtaagagagttcctggcgaaggctttattaccattaaaaaactcaacggatcttttgatgaagtcatcgattgtgcttggattggagacgatcatttggctgtttgcagtaataccgagtttatagatgttatttccacagacggtacacaagtctttggggtgcttgagggtcatactgatatagtccttactttggattcatctgaagatggtgtttggttggcaactggtgctaaagataatactgtgcgtctttggaatttaaacattgaagataatgtttataaatgtattcatgtattcactggtcatacggctagtgtcacggctgtcgctctgggacctttggatgttaatggttatcccactttcctggcatcttcctctcaagatagaacacttaaacggtttaatttaggttctcagctaaataagtccgatttttcaaacagagctgtgtggactattaaagctcatgatcgtgatgttaatgctattcaagtttcaaaggatggacgaattattgcttcggctagtcaagataagactattaagctttgggattcatctacgggtgaagtggttggtgttctgcgcggacatcgtcggggtgtgtgggcctgttcatttaacccatttagtcgtcaactcgctagtggtagtggtgatcgtacaattcgtatttggaatgtcgatactcaacagtgtgtgcaaactttagaaggtcatacaggtgcaatactgaaactgatctacatttctcaaggaacccaagtcgtaagtgctgctgccgacggtttggtcaaagtgtggtcgttgagctctggtgaatgtgttgctacgctcgacaatcatgaagaccgtgtgtgggctttagcttcaaggttcgacgggagtttgttggtttctggaggtgcagatgcagtagttagcgtttggaaagatgtaactgaagaatacattgccaaacaagctgaggaattagagcgtcgtgttgaggctgaacagctcttatcaaattttgagcaaacagaagactggcaacaggctattgctttagctttgtcattagaccgtcctcatggacttttgcgactgtttgaacgagttatgacagctccacatcaaccaaatagcattactgggaataaagatgtggataatgttttggttcagcttccggatcatcaattaataatcttgtttcagcgcattcgtgattggaatactaatagtaaaacaagcatggttgctcaaagattgctacgtcttttattacattcatactcccctgaacaccttctcaaattatctggtattaaagatattttagattctatgataccgtatactgatcgtcatcttgcaagagtcaacgatctcattgaggattcctatatagtggattatgttatttaaaaaaatctcttcctaattcccaattctggaatgaagactcttaatttaaaaatgacctgttaaatttgggttttttttacttggttaaaataatggatatttggttgtgtataatttactggatcacttaataaaatgttagaatcctttgaataataatttgtttagtgggtaactgaaagaatgatatttatcctcatatgtattttttttttgtggaaaaatgaattacgagtgatggagaaaagccgatttgcaaaaaaagatgtaataacgtcagattccttcaaagttgagaaagccggacattaaaagaatcctataatacttcttcttagtaatttcgttggtccaattccatgcactagtgagccgaccatcaatacaacttccaccatcagatccctgaccattaaaaccatgacgaaaaaagtctaacaaaattgttttttgaagtccattgacgcttccatattcgttttcgatatactgaaccaagtatggatcacgtaaaaattctagttgctgtaaaactttgaccaatggcgctaatatgtgaggtacttggcgatatttgtcaataaacatcagggcattaggaacatccctatcacctaagtgtattacagagcttcccatccaagggatttcttgttgcttctgaacggatgatagaatcctggtaactgtagatcgaactaatggacaaagctgaacacgatttaaaccttggccagtgtcactaatgaagtacctagaatgtttatcgagtaaagaagcgtcgctctctaaccataaaagaaacatttggtccatcatacaggaccaaaacactaaactctgatcaacatagaaaaattgagttttatggtcgtgatttaatttggcaccagtcatatatccaatctttaaactaccatttttagtgtcgtgtggattaaaaaatttatgtaaataggcacgcatcttttccacaggatttcgattagctaaaaggaaagcttcatgatcagctaaagaagcgaagcagtccgtaagcactttctgtaatttttcatcttttcctggattatactttttcaaaagagtttctgaagcttcttcccgttcttttaacagttctgctttggcattggcattactttgaggatcgctctgttttaaaagattgtttaaaagctgtttctcttcaagcagacccaaaagtttgtgcttttccaaaacattgtatacagtttttatgggtgatacgaaatcaaagccaagttgactacgaacatctggaattaaactgtcttggcacatatacataacagcaccatatgttgcacgcattttctcgggattcataattttgtatctccttccaatttcaaaaacggtttgaaaaaacctagcatttgatttgtggtctcttccaattagtaaatcacgtcctgctttaatatccattgcagtgacaagtcccatcactatactgcacatttcgttcaagtattttaccatcagtttggtcctggtggtataagagataatgtcgacatggcccgtataatcaattacttcaagtctataatttcattgttagttttggtcgatccaccaaaaacagatacgatcgtataattttatgtcccgagaaacgggaaagtgttcaataataattaaataatgtaacagttcatatacaagagaaataatttatgcgaacagttcttgtaaaagtttcacataatcgcgcacaatcaaacactttggaaataactattagaaaaatatttctttattggtaatattttaaaataaggaacccttgaacattccacatttcaaacgggactcggccaacaggcatttccataagatggatttacttacgctgcttctaacaagctcaaaatttttcgttcctcatcacttaatcttacagggacatattttgatttttctacccaactctggttaaacaattgagctattgacattttggtgttggtcaagtactttcctaactttgctaaccaattctaaacacttgttttgataaattctgactacaacagctccattgtcaagctttcataaagattgaatatttaaggaagtaaagtatttaattccttgctataaattacatctttggacgattgatttcagttattgtacgataaaatataaaccaaagttttgaggtgaaaagtggctatttcgactaattagtcaacttggctgtttatttgggagtatcttgaataattgctcaattttcaataagtctctctttttttcgtcattctgattacaaaatctcacgtttaggattttttgtgcactgatctttgcttaccattttccggtagtagaagatacttaatttacatttttctaacaaggaagaataattatataaaaaaatttaaattatcgtgcactttgtttgcaaaaaagaacgactgcctcaaaattctgaaatgtcatttttccaactagaaaatccatagatagaaggacttggctcttaccattataggaccaaatgtaccagcagcatatcttttactttatcactggaggtatcttcatcttatggatacttgctcatagtttctttgtcaaaattatctatttatgggcttctggttgtttgttgtggtactgtttggagacgagaacgtttgaaaataaaaataatcttggaacatctgagccatttcttgttaacccagctatattccaaaaacgagcgcgtcaattggcactttccaaacttcttcttcgtcagccattatatccaggaatacctgaaatttctgaagagatagaatccattatttcacattttatgcaaaaatatattaaggtatggtcttatcaaattattcccgaaccgacaatttcaaacagtatagaatcccatttgcgaaaatgtcttatggtgttattaagtcgagttgatgaaattgatcttgctgatgttttggttaaaacagttctaccactgattacaaaacatttaagattattcgttgaagcagaacagcttgttgtaggtaataaggcagtatcctttactgaccattctgaactgtctcgtgaagttgcggcgaaatatgatcatgggagattgcatgaagcagtacttctttctggaaatcccatggtagctcagaagagatatttacgaaattggacgacacaagttttgtctattattctaccgaattattatgaaaccagccctcttgtactttcgctcgttacagaggttattattaatactacattattaccgctagtatcttatatttcagatcctgattttttcaactatttaattattcaggctagcggtagtataattcagcgtcggcgaaagattcgtcgtctgaaacgtgccattcgcaagcaatctaatcactttcaggttggagcacgtcgtctccgattaaaagatagtcaacactcttttgaacaatatattcatgaaattaaaaaaatctctaatatttcagatgcccgaagattacgttctgaactaatggtccaaaggcgtcaacttgaacagaccgaagcatttgattttgaatttaaacaatatagggagcgattacagatagctataattactgctgagaaaaggatttccttactttctggaactccatttcagcataaagaagcggtgctatttgaacaagtgcaatcactacttcaaatcctatctgactcggcggcggtttcctgttttctcgaatttatggagagaaagaacagatctcgctatttgcatttttggcttgtagttgaaggcctaaaagaatcacaggatgatccattgaatgcgcatatgattgcgccgttttccgatatcgtttctgaccatacagactttacagccattgtcaaatcatactttgaaagcgtcgataacccactggacatcccaaagcctctcactaatacaattaataaattcgttaaccaaagtaaagataacttaaaccctgatctatgggtagaggctaggaatgcaatgcttatggctcaagagcatgtgttcgatatcatgcagaacagtgattattctgaattcgttaacagcgagatctattacaggttcctagcccaagatgtagtatctgatcataagtctaccaattcttctgccacgttcagtagattagaagagttgggcgagaacataccagcgatatcaaaacaaccttcatatcttagtatttcttcgtcgtcaaaatccatcaattcatctccttctccctctattcagttatctgtctcttcgtccatttctcgggataaaaacctctctcctttggatttagaattggatgatcctacctatagtgatgaagaagaagttttatttgctccaccaggtgatctccaactttctgaaagtatcgatgaattaaacaataacatcgaggagttgaaagctcaattaaacgctatcaacactcttataaagaaggctgagctggttgctgaccaaaagcaattgaaaagccttactaaaaaccatcaagagattgaaaaagcaattcaccgcaaagaacgtcaacgagatcagtatatgtcgcaagaagaagacagtaaactctttaatcgctctcgggtgtctattgattcatttaaaattagcaaagaggagaacaccccagactttgctgtttacaccatacgcattgaacgacttgaaaatggacatgtccgttccggatggatggtggctagacggtatcgagagtttgcagagttgcataagcagctaaagcaaacataccctggagtcagatctttaaaatttcctcaaaaatcgatcatcacctctttaaacaaaaatgttttggaatatcgaaggggtgctttagaagaatatcttcaatcattattcagaatgccagaggtttgtgacagcaaaatgttgaggatgtttttgtcacaacaaaatatcacagcaccacaaatgtttaatcctaaagaagttggcaaaaaatggaagcagcttttagaagtcttagggtttgaagttaataattctttcaacgcatccaacgttaacactaactcgtcattctcaggtcccatctcggaatttttagtcgaattgttttctccaaatgacgatgcaaagcagcaatggttaccgaaaaaaacttatatatcgatattggaacaactttttggcggagctttggaaaagcgtatacgactacaactgtttcagttgtttacgcctgagaagatttataggaagttacgcgagtttagacgaggacttgaaggtaaatctaatcatgatcactccaaagaccgccgtcattcacgggcgcgaaagccagcttatgctgataggaatcaattgaaagcagaagcagggattttgcttgcttccatgtttcccggctatacacctgatattgctgtgaaaagaatatttcgtattctccaaaaccaatctctaaacgctcatgttatatacacccttcttgacgagattttgctggctttaaagaaacacgctagatcaactaataaggcaacttgagtgtcacttttttacctctcttgttaaatcatagcaagagtaatcatgttcatgcttttctttaatcatataatgtaatttcttcataggatttgataatactttattacaattcatccactagataatttcaaatcctgtattgttactgactttaaaagaagggttataccatttgaagtacaaattatgcgtaaaaattaaagcaaaaagactttttcattttagccaaaaactatcaaattactatgatttttctatcccctctccattttcttgcataagcaaatggtggcttctagtagcgatgtcgggtagagtaatcttttggagaaataacaagacctttaccttttctagcaccacgaaaaatagtttctataatatcgatcatctcttgtttatcttctaacggccagttgattttgttattgttaccagtacctaagtcaatcatcatgtgtttgtttcgataaaaaaacattattgtagttctgtcataaagctcgtacatctagatggtaataaggttagcaacatgactttccaactaagacttagacttaccttgttgaagtcaggaacttcgtcaatgtccactaaatatatgacagccatgttgacgaccttttcagcaattctgtataggacttcatcttgttttatacattcttcatcctattccgttacgcgttagtaaattaatccgcctacaatattaaatagacttaatccaagtagatatcgacattagaacatacatgatctctaccaaatcgaatgacaaccaagcgctcttgttctatttataaaaaaaaaggttaataagctgattcgaagttgtgaaacgagaaacattctacgtttcttaaagttcgcgtacctgataaaattgcttgatcaacgtgcctataaacataagttagagaagaataaatccatctatcacaaaaacttaccatccagaatgtaaatgaggtaaaaaataactcattatatcaactgaagctgctgaattgcaatattttggtaatttctagcagacgagaatagtgtagatatgtaagtcacacaatatacactttgcgcgttaggatgtagcaatgctttaactctacgtaaaaaagcgtataatagtgtaaatgctattcagtaaataaatttagtgaagttatgagattcttgacacaagtgggattgctattactttcgtacattacatgcttagttgaatcgttgatgtgtttactacaattatatatattcatacttcatctaataaaacaatgaaattcagaattttttacaattctagaaaccgaccgtttaagcagtttactgtgtttaaaaattaaagtatccgtaatattccaaatattttgtgaaatactattataaaaaatttaatttagaatcgtagctaggccgtataaaattattttttcaagtcccaatcgcaacatagacgaatgacctttgcgtttttctcgactccatagcataaaattacaattgcaaattctttaagtgacttgggtgttcgcgttgtaagctaacttttctttttcagatttgtttggagagtgcaggatatgctataaatttgtatttaagaaaatttctgaaaggttaaagtcgccaaaggttgaaaattttaaaatgatgttgattcatgataatggcttcggggaagataagtgttccacccatgtcttaagttttaatagtaaatggcttaggattactttattcgtctacaaattgttgcttcctcttgctctgtgaagacttgatatggccccctctataatccacgaaccataatagaaatgcaaatcgtttataatggggagctagaaatcaagctggcgttttagggataaaccaaatattgtccaaagcaagtaatagtcatcagtggtttcatttaaaatacatcaatagttgttaaaatgcagataattatgctgacctgtgaaatttttggggtatgaagaatcatgtaattagagtttcttatacactaacagagctccagctctctctcgactttcaggaatcaaggagttataatacctctgtacttcttcatacttcaaccctcgggagtcaagatagctgtataagctataaaaccgctcttcaaagaaaatcagataatccggccattctttaattttatctagaaaagtaggcatattctcgtaaaaacgatccgtctcatcaaagggcttttcgaacggttcacatgtcaagaacttccatccattttcagcaaaaggtgaatggatatgcgactgccatggtgtagtgtgacacggagcaagtattagaccagtttggtttttttcagcaagtgaatgtattaatggcataacttccatgactccaaattgatgaaatcggcataaaaatgtaattaccagagcatgtcccaatccaataaggaagaaaaaccgtgctgcacgcttccaagaggaaaatgatgaaaaaaattttccagctaaagtaagtaaaatcggtgaaattgggtatacaaaccgaagttctttatgtcctatcagtgaatagggaaagaaaacacaaagaatggttcccgctgtttgaaggtccattgtgagtaatacgaatggaagaaatcctccgcatattaatgggagggcttgagaaaggtaatagtgccatgcgttcaatccatacaaagaggaaaggcctgaagtaacattaaattgaaagaacgaaatgatgggaaagacaaaacgaccgtaaagtattctatcagcaataatattaactaaaaataaagacacacacaaaacgaatatgccaaaaagccgcccataaccgagagcatataaaaaacgaaagcgattaaaaacattggaaaacgagagtaaatcctttatgggtgtttgaggatttttgttccagaataaaagtgggaatatccagactagtatatttgtaggtcggatgaaacaagcaaaggctgcgactgaaatgaagcccaaaagtgaagagtacgctttcttacgttgctcaggagaagagttttcatattttaggtagtaagagaaatagtaaaatcctatggaagtcaatgttgtctccaatgaattggaaaaggttcggacaccaacgtacgcattcattatggagacaagagagcaagccaacgtccaattcgcggttttagaaccatatcttactagtgcaaatttataagttccataatctagtatagcagcaaacgttccttgcaggagttttggagcgttcgtgaaaacgaagtaagatgagtctaacttgagtacttgcaaaacacgatatagcgctgcaaatataagcggatgtagagctgaacggattgctgaggtccattcccacgttaagaatccatagcggaatatgaagtgatgggccacctctaacgattggtaaaattcatcaggttgaaagaacgtttttacccacaacgcattccaccatcggaaaacaagaatcgctaaccaaaaccaaattctcatggcttttcgatgtacgttacgacggttggaatgctaccgcgcttctagacttatgccttacaagccttcgttcttgttcagtttaataagcaatgtcaacgaatacgaacggtttgtgcctttctgtcaaaagtccaaagtcactgaatacgatcctaaaactggatatcctacaaaggccgaccttacagttggttttaaaggattgtgtgaaacttttgatagtaaggtggtttgtgatcctgttgccctaaccgtgttggcagacgcgtcccatcatcgtctgttccggcggcttaaaacacattggagtattgaagaggcatctcggggacgtgttcgtgttgatttagaggtggattttgaatttgcaagcaaactccatggcatgatgagcaagtttgttggatcttctgtagcttctgaaatcattcaaggattcgtccaacaggctaaaataaagcataagctagaatcagaaaatgagaaataattacaatgatcctgcatacaaaggggctatgccgctattctttccatctcagcgtttttccatcgtctctctttcaaccaaagaaggatatatttttataaaaggtttcttttaggaaatcatggcttcagtaagctaaattttggatccttctcttcaccttatgtatttattttatttcatttttttggatactcgccaatatcatggtatagtttgctttactgcaatttttttgatgcacaacaaaaaacttggtaaattatttctctactattaaatcaagagcttaggaggaattctcatttcttaaagaaactttactttgacgaaactgtatttttttttttgttttaacaatatgtcttgaatatgccttccttttcttgagtcactgataaccaaatatatataattataggggtgtctctctttctatttagtgctgaaatattgcggatgagctttgcctctaaagttgataaccagagatcaggagtccttgaaggtcaactgtttacaaaattatccttccttgcttttgaatagaaggtgaaattggttatggaatgcttcatgaagatttgcattcaaaatgcatccagaacaatcacaagtgttatttaaaagtaaagaatccctgaaggaaagaaaaagtgatctatgatgatcgttgttaaaaagtctatcaaatttggtctactgagatatatctagggaaagcaaaatcatttaagtaagacaattcatgaaatacccggagcacctttatagtcgacttttctttcgatgataaacatgacatgatttccattatagctacagaaacgaattttatgaaaaacaatcttgtgtttaccaacattttaatatcgtgctctattaaactgtgcaatatgcaaatacggtgtttgccgatttgcattaacgggaagtatttctccagtaaataaatgaagcaaagtgtttttatgtaaaatccttttatcgcttttaacttataaggatttacttagtatataaagttgctgaatggagccttaaaagttctagctgttttttcgtgaaataaactatagcatcaccattccataggtccattagaagttgtggaaattatccatgagcatttttatatagtgaaattagaataatttttatcattgaaaataaattattaatttagttcatttcgaggatgaaaacaagttttattataatatacctcttatttataccgcattgtttacatcgcacgatataaccaaacgaatccagttaacgatagctacaacagccatcggtattaaactatagtgatttgataagatgtttcgaaatatatactggataatataatcactgtccgctatcataaccttaaaaagaaatctcctctacaactgcattacttgtttactgtgatagtactaagaaattctccacgtaaaccaaaatctatttttttttcgaaatctcgtattttatatacataggtttcccctgtcattttaaagttctgattgtttctttgaccttatggaaacccattttacaatgcattcagtataacgctatctaatccattctcatatacagtataacgtagttataagtatattgatttgcgatctctatcatattacaacgaaatacaatccagtctgcaaagccatgacttatatgacgaactagctacatttctttctccattaaatcgattaaagaagtatggcacaagacgattcttacgaagagaaacctgaagttatatccagcgactcgggaggaagtggttattcaactgaaatccagatcgtcggtacagtaacttcctcggacggttcgtatgttgagtatgaaattgtacaccaggtatgtggcttgagatccttggtatctatgagtttagctgctaatttttatactgtagaagcgttccgtttggcggagatattcggattttgagtccttggttaagttgatgcgtcggcagtatcccgctgcaattgttcctcctataccgggaaaacaatcactttgtaagttttccaatatatttagatataatatctttcatcgcgttttttcattttcttttcaaacgtttattaacatgggctgtgtgcaattcattgtacacacatgctccgctgtttagtaagttatgccaaacatccacgaaaagctaaaagtgatgctgaattcttaaattttcgctccaggatgctagaattgtttcttcgtcagtgtcttttgcatccatgcattcgttccaatcctattttcgataagtttattcatagcactgtttcttggcacgtgactttatcatctttagatttaccaaaggattcaaatactgatccactccgccttcctcctattgctactgagcatgacccattcgctcatttgcgctcttccatgccacttgtaatggccaactcattaagtcccccttcgtctcgcgcattaaagccaatccattccttatctaatccttcaactgcttcgagtttagaaccttcttctcctttgggctctgaggatgaatgtcatcccccaacaagcgatatgcaacctacgcatgaattgaatgaaagtccttctaccccaacggcaccagactttccacattacaatagctcaccttcggagttatctcccacacagcgtcgttccagcatttctaatggtaaagacgcaccctctccagtactcaaagatttgacttcctatactcaagaagtgattgtttgtcggaaattccttcatcatagtctgagtccttccatacattcaactttatctagtatttctaaaatggagtcttgcctttcaaagttaggatcggcatttcactctttgactgctctcaatgaaatacaattagcaaatcatttgcaagtgattgctaatgcctttgaattcagcggaatgtacgccaaggaattcgaacaagaatttaattcctccgtctatgaaaaaatggttcagtctatgcagctggcgaagtgtgccgcagatgctcttaagtataagcaattgaagatacaacagcgagattttcttcaagaccagctcatccactctaacacaatgtctgctaccgactctatggtagctgcttcacccacgatacacccggcgaccagattgaatactattcaacgagcagttgtctcccaagccaaaaagggttacacaatttttggtcgcttacaaaacgttttacatgactttgtagaaggtgaaacctccattagcaaagaaagtctccagcagcataagaataccatagagaatcaactagcggctgcaaattgggattgtcaaaaaattgacgaattcatggatgcagagcttaaattctacaaagaatgtcagacgtcgcagtgggaagaaataattaaatctgttcatgaatgtatctacaaatgggcacaaacaaatttacaacgatggttgcgaactcgtgaagaactcgaaaatttatcgaaggacatataagtacgttgggtaggtttgcttataattgcattccgagtcttacatactttgtattttattttaatttctgcatacatccttttttatgtttcttttttacgattttgttaatgactaataataccacatgacaagccttaactatgaaagtcatatttcccttggaagatctatcgcttggataaatttttaaggtcgagtacattttattaatgaaaaatttatttaatgctattatagatttagaaatattaataatactaaagcatacaatgaaagctgttcttctttgtgaatattcattgttcctcctcttacctttttatcaatatgtaccgacaaatcgtttaaatcctttcatttttctctctaccctttttctctttttttgttagttaaagtgtgctcgaatagagccattttacgaattacttgaataaacaattacttaacaagaactttaaccttctttccatattgatcacgtacaaaaatacaatgtaataaaaagctgtgggataaaaatgatacaaaaaagtgatatttatgtcaaaatatgaatgtactgttcaaataaaaggattccaacaaaacaaaatgtaagaacccgtatgtttgttcagtagttttattccttccctttgcgaaaaggaggtaggatcaaggattcagagatattacaaatgcgaggaaaaagaaacgcagtcaattctttttgacagaagggtgttgatagaattgaatttttaggaaaatcaaacgacataaatgagatgaataaaaccaaaagacataaatccattgtcggatttacaaattagggaaaaaagggtccgcacaagagtgagagaaaatgagtgtcataaaaggaacacctaactcacattatcgtacaaattttataaccaaaagttacaaaagaattttttaattaagtcgcttagtgaaagaacgctttgcaagggtccaaatgccagctgcagtggctacaagcgaactactaatagccatagcacgaagtccacgagtagatttgtaaagagcacctgtcaatgcaccagctgcaacactattttcccatccatgcttttggcgcttgtagcctattaaagaattgattccattatacacgagggcaagcacacccaaggaattaccaacgaaaggaccacgtcgtgtaacaccgttcaaaataccattaaggcgcaaccgtgtggaagtaatatctttagttttcttcatgccttcattgagaccccagagtccaccaatcgccaatccacttaaataagaagttccagtaccgtaacaaagatcatcttgccatccgcgagatgggatagccatgctatcgcctggaagagtagaaagagcatcttcctcaatcaataagtaatccagaggtttatctaaatcagcgaggggatgtaacttggcgggatcgaattcagaacccgataaaatatctgaggctgtagcctcggtagggacctgcaattcagaagaatcaatctttgaggttggttcctcttctttatttcttgtaaacaaccaagacatatcttaaaaagttgatttttcgcaaaggcgcgatggtggttgtctgcaggtagcggtggttacaggaactgtgtattagcacctaaattaaaatagtagaaaaaaattgttgagacgtaaaaagtgtcgcaattatcatgaatttacatttatatataaaaaaaaagacttaatgaataaatcctcgatcgttaaataacgcccgaacttatttactcgatcaccgcttaaaattctagacaagttgggcataggtccatcgataaaacaatagaatagaagaaactataaaacttttttttatgagagaacaaacaacgaaaatacaaaaaatataacactaagtattatcaattatacagttacgcaaagcaagcataagaccgttgtgaattaaatttacgtccagacaaatcaaaggtctctattaatattaatatgccattcacattaagagccaaaccaaagcgtgttaaaggaatacattgaatccgtaaatatcctaagtacgaacaggtaaagaaagctaaagtagatatctaacaacaacaaaaaacgaaacttgctagctcaaaatcacaaaaccatattcagcacatttaaacgacccaaaacgaaagaaggcctttaaatttctttgagcgcaaaagtaagactgggaatttaagcagtctatttgaggacatacttgcgaaaagcaaagtaagcaacaaccatcacaaggacaaagagccacatagcaggcttaactggttgagaagaatcatatccacttccaccagcggcagcaccagttgtgggaagctgagggccatcttcagtctaaaatatgttagagtgtcgaagcaaatttttacaaaaattttaacgagcctatggcgaacgaagagaaaaaataaatgacatactctgagcaagtttccaatgtaaaatttttcgagcaactcctgagcatcctcagagtgaccaacatcctcgaaaggaccgctagcatcacgacctaaaacaagttaataatcacagaaacgaacaaaaaaaagcccctagcgatggtagagaaaggcagaaactttgtatagccaatccaaaagccgtatgtgaagaatcgaagcgatatcgtcaatcaatctttccaaaattatgtatttcagtgtattcagagtactggaaatacaaaacatcgagtagagagcgatcaatcttggaacatatagactgtacttaacaattcaccttcaatgacaatgtcgcattaaacatcgtatttattcaggatatcgcatctatttttgtacgttcctacggcaaagattcgtcctgaatctttcaaattaaagaacatgtgtatatgcgacacctaaactctcgtgaaattcaaagttttgtaacgctagttgtctgaaacttcgatttctacgactccacacaatcgcgaccaatttttatgcattacaaccaatcttcctcaagacctccattatcgcgtacccctaaaaatttacttaccggccaaatcaacaagaacctcttcaccaccagggtgagcgtcaaggaacttggaaatatcatacaccttgtcttttacaacaatgtacaaatcatcacgagtgttatgttttaacacttcttcaacagtaattgtcttctctgccatgatcaagttctgcttattcttccttaaaggtggtatttaacggttataacccaggagctaattactctcgagatgttggttgcaaatgccctatcgcgatttatctagcaggtgggaagtagaaatgagccgattcttactggcaggtggtcacgtggattcgagttggaaggtacacccaaggatatgaacttacccaaaacctatatcattcttcagttaaccaactccaccattttggaggtgtagtgtttatatttgaatggcaatataatatttaaatcaatttaggacgctaatcaagttaatttttgttcacatctttgctgtttcgttggagccgtaaactactttgtgacaaaccatcaactactcagaatttgtctatcacccaaaaacttaacaaaaaatttttatttgctctttttgatccaaccttcttcctctccttttgattttatacgaaaaatatgctgggtgcatttaactcgactttggctcgctttggcggtcttgttcataaagtaccttggagattatcccagcgaagaaaatatcgtcaccgtcaacgacttcgtgccgtcgatgaggtggtagatgttttgcgcacggcgttgcaagagaaaaatcaatcgtgcaaacgaattgaaagtttcgttgctaaccatcagcctgaatcccaaatgtcaccaaaggataaatacactatgtttaccaggaagactcaaggtgccggtctccaaggcttccgcaagggtgtccataaatcaccaaaatggacccgtagtactaatcgtgttaatcccactggcttttaaaaacgtctggttgcaaaagtttactactttttttttcataattttaatgctctatgaataataaatgtaatggattattttaatagcttattttattacttttttattgcaaaaactcccacctcttcctcgtcttcgttcatattcaatttccagtttcatacatattcaaacaaacgacattagcctttagttagagtaaagttcatatcacctctattatacgtctctttaattctttgctctgtaaaacaatacataagcagacgatgtgacaatatcctccggatctatttcacaaatagctgtatcatcaaacttaaagaatgtttggctcgatgcatctcttgcataggcagtataatgaccattactcataaacccgtgatgattgtccactgcatacaaatcgtaaagcatcgatttctgtgacgatagccactcatgatcttttataaatggactcaaaaattgcttcaaattgagatcaaatactggataaactactaaatcccttcgtttacgtcttctccgcaaatctccaccgtggccgctgaatcgatttaaatgaatgactagtatttttggcaatcgccagatctccagccgttttgttgccggtcgaaatgccttacacccaggacaataccaggaatcctgtaaatcaagctgctctggcttggaaaactccagtaaacaatcttcaagggtgatggactccatatggaactgaattttttcaaatatccattcgcagttataaaataacttttcatattgttgatcgttccatagacacataattacagttttgtcgtcaataacgatttcctcttcctccactatttcaaaccttttaacctcaatttcctttatgcattcccatttcccggccttactttccatccgcttcagtccaagctgaagagttccgattgctacgtctatgcctgcataaactcgatacagttcgacaatctctttcactaaatcatttgtgagtacatttcgagaacggacgttgagttgtaaaggaaatccaaacacatcgttagactggtatgatccgggcattgccggtcgtttacatccatggacgataggtattgttaatccgtttgcagtacttccataaagtacaacatgatcccatttatgaatttttttagatattttgtctttatttttcaataccttgtacacctttccccgataaatgtcacaagcagtaagttccccgcattcgagtcccatcttttgaagcttttccgtagcttgaaacttcatttggattaccgtactttccatgagaagctccaaatacaattccacaggactctgtgtgccaaatggcgggacgtacactaccttgtgtcgccattttgcactagtaggaagtggaagagtaagatacatgaacggatcaaacgcagttgatttttgatagcatatggagcactctaaggtgcttttatacattccttgaaacaactgaacaattatggaatcatttcgttttgtatgaatatcccaacattgatttgcaactctctgaacatgtaatgggtgttcgtcaaataaatctggcctttcaaagtatggttttatctgaattcgattcaaatcttcgtgtaacccgtctaagaaaaaggcgatgaattcctgagaatcttgctgacgatatccagaaaaataggtattaaactcgccaattataaatttgaaagaactaggtgacaccgagtgcatatcagcagtatgatggatcatcttcagtagactagcataagacaaggcaactttccccatcattcccaacggattgttgtaattaatatccttttcataagaatcactaagaaaatattttgtaagttcgtgtgtatgtatcatacattgaagggcagaattcatatagcatgaattacccaaattgtaaagaccgcagagtccgatttctttatttattgttaaattttgctctttggttatagagtcagataaccactctccgttaggatgttgaaactcgagcaataagcttccatcggcaatatctatttcgaaaatagtcatgcaaacagcatactcggaaagcaaagcaatcgcaggttgatcattgaactccgacaaacttacaaacctagaagatagattacttttgtttagataccataaacggaaagaagtaccatcagatatttggaaagcttccatcacttgtttgtacaaagaccgaagggtatcacttcgggaaaagctaaacgcatagggttcatcactatgatatggttcatcaatttggtataatggtgaatagctcgtgttttcaccgtttattgggtcgaataaaacgtgcaaagtaaagtttataggatagatatctacgaatggcttttgctcagcagccaatcctaccaaaagaacttttcgctctatagctagaccttctaatccaaacctatatttgagttagctaataacataatgggaattgaaaagaggcctcaaaatccaagggaacctatatatttaggcaccgtgggaagtaatgcaaactacataaattaatgaaatattcaaaactaagacacaatgctttcaaaacatatatgaatatgagttttgaatttaattaataatgccttttacaagtactgtagagacctttaaagaaaattcataccactcaacaagcatatgccatagcgaagcagagacaatgctataatcaatagattcctccaaagaatgtttaagctcgtttttttcatccagcagcctccattgagttataggaccagggttgtcgccttctccatatataaagtcaacgtatccttcgaaccagtcatagtcaattaaaaaggcagttttttcttttttccatttttctttatcctctttaattaaatttatcgaatcttggaacggcaatgaagcaggttggtcgatccaaatttgggaatatcgagtgcttgcgttttgagtagcagttgatgccattctcaaaacatggtcatttattcgttatatttttgtttcttcaagttccactcttataaattgcaaaaaattgggggaatggagttgttggtttaagtaaacttgttgtaccaaatggtgaaaaaggatttatacaggtgacgcatattgctgccctctgtcaagtttgagttttcaacaacaatttgtaaaagttgatctaatcgaaagaataaagtatcaatatattgcctcgtctatatttaacgatttagaaatagcaacttttgaacttttccgggaaatttttttttgaattttaacccaacaagctactcaaattacatctcaatcaaatttgagcgattgtaaactttaattttgatttaattgtgaataaaggaaaaaattctttatactacttgtaaaacctagtgaaattttctattcattttacagcgtttgtcgaaaacccacaaataggacatcagcagagataaaattacattttgccgaaaatacacttattatggccgctgaacagaggaaaatcatagaacagttgatgggcagtaatttgagtaactttacctctcgaggcctagtacatttcactgatcgcaaagtttgcagaagctttttatgtggtatttgtcctcatgatatatttacaaatactaaaatggatttggggccttgtccaaagatccacagtgacaagttgaagtcggattatgaacgggctagttattcacatgactatggctacgagtgggattatctggaagacctagaaagacatgttgatgactgtaataagcgtattgatattgctgaagctcgtagagaaaaaacaaaagaggaggaagaacggatagatgagctaatgcgagatataatacataccgaccattcaattgaagttattattacagaaatggaggcgcttgcaaaaagaaaattagtgaatgatgcagttaaacattttattgagcttaataggttgaagacatacaggaaagaattatatgatgaagtgatttccatgaatgaaattcccagtcaggctagcacaacgcatcaaaagctacaagtatgtgatatttgtagcgcttatctttcaagattagacaacgatcgtcgtttagctgatcacttctcaggaaaaatgcatcttggatatgccatgctgcgaaatattgctagggatcttcgagctcaattagaggaccgtgaaaaatcccgtgataaaaaggacggagagaaacaaagagataatttagcttcttttgaagataaaatctcaacttcctttgttgcataacctacatttcgtaatgaaaaagtggaggatctcaactaaccgcctttattcgcttagtgatgccttttacgcagacctatatagaatcttattattatgtttacctttttacgtttatggttgtttccttacttgcttttttacaatattcttcatgtcatgcacaaaataagtgtacctcttatattttatattcgtttatttctaatctcacaaggtatattgatatatgtatttcaatttgaataacagctataagtatatccttaaaataaagcaggaataaactctttgccttaatattgtcgtactaacccaaccatccttacttgtccttcagcaactgtttgttttggagaatctgaaatcgaaaggagtcaaactattttactaaattaactttttattttattttgtatagatatccttgaaaattctgtgattcgaaagtccagtggcaatgtagaagtattaaacgtttatcaacggttctaccaaatcagggccgataaaagaactctcgattataatttacgtttaatacaatcatatagaataaataaaaacataacatagtacttccaactgtaaattgacttgcggcttacatagtgttttttggcatacttgtgcaaactaccgacttcacaatttacatggctcaagcttgtaaaaccacatactcatctcgtttgaaaacgggaaatacatgcttaatccaaaaaaatgttgcagtatcgactaggtcgcattcttcgtatacaggcagaaattcgttgagaaatgttccagcggttaattacgccgcattcgaacaaggtgaggattttgaaacgccagtagaaactccagaaaaagaagaggaaaagttcgaaacggatgatcgggggctggcagttggcagaccaaccggaaacaacatctatccaagattcgcgactaaaacaagacatatttacgttacagacgaacagcttaaatgcgctgcagaagaacgagatgtatacataccaatacggctggatattgaactgcccaacaattatcgactcaaggacacgtttttatggaacatgaacgagcaagtaatgacaccggatgtgtttgctcaaatcttgtgtgccgatttagatttatctacgaatgtatatggaacgcaaattagttccagtattcgtgcacaaatcgaagagtatgcaccggtggctgaggtgcctatgccaaaggggcaggaaatgctcgttgtattcaatatccaagttcaacttgctcagttaagctacaatgatcaggtggaatggaatttaacgagtcctcttacacctgaggaatttagtgtattaacctgcaacgatttggggctttctggggaatctcgaccagaaattgcctatgcaatccatgaatgtcttttaaagttgaaaaagaatgcatgtgagggtgatttgccagattacgacagtgatgcagttcctggaacgaaggctggacctcgtcaggacatggatactttgggtgcattatggcaaccagtgctggaaacagtttcccttgaagatgccaaaaagaatgagaacaatcgagagaatttggtgaaacaatggcgtcgtgaagcttctaagtttggaggatttgcggcggatgtttcggcagaacgatggcgagcggcagctctgggcaatcttagtcaaagcgagacagccaacttgcccagtgcttcagtgtcggatgcacaaacactgttggaacaggaacgaccccgatggagatgtcgttggtgcaacgtgctgggcacaggaacattttgtgttcgaagaggacccgaaggaaacaaatcattgtgcaatgcttgtggtgttgcatatgctaaaacaggacaattgccatattggagaaaatctctatacacttaaaagatgttttactctaatggactgatgtatttgatgttcattagtcgtgttttaaggagacgaatttaatggagaaggtctgactttatggttcctctcaagattgtcaatatgattaagtccacctgtacaaaagaatgggtataatacacaagacatttaggcaattgagttacattaggaccgcaagaaagcgtcaaatagataattaaaatgataatgaattttgggttttcgacagaaaacaaaaaagcgagcaagaacggatttaaatgttataaagtaatggaagaaaaattgtagtgacaaaggtagaattatgctcatgtgatgatgggccaacctctgacgattattagtgaccagaattaatttacttagcatgggtttactagttggtcaattttcttgcatgaaatacaacgcagaaattgtaaatactttaaatagacttcatttaccctagctatagattatataataagtcataaaagaaacgtctcttggtccaatctgtaaaatacagcttttgaaaggccaagtacgacagagcataccatgtcgtagcatttcatcgttacatagattcataaaaaaaaaacaagagaaaaaacaataaggaatcataataatacgtaaaagcaacgtttattactgcgaaggagcagagcagtcatcacacccaatgccaagtccataatgggtacaggccaaagcgcttcgcaagtagaaaatagatggctcgctcgctaacttacatttcgtcgacagatggaggagaggtcttatcgttgatcgttactttttcagaatgttgtcgttcggatgcggccttttcagcagtttccttctcgagttctgggataggcgtgttgtcccagtcagaacgaacgtaggcttccgagtcggtagcgtcttcacgagaagcgttttctttaggtggaataacatcttcctcttggggatttcgagagtgtactgaactagcgaaaaaacgattagcggcaacgacagggttttgaattggaagagaacaagcctttctcgccgtgggcaaaccaagtttaacggtttgcacgatcagttgggtactatgtctgaggctcataatgaaaggacaaggataataatcgacaagttagatttaatagaagaagaaacaaaaataaatgcgtttgatcttcaacaaatatatatattcaatgttcacaaaagctttttctcaacaatcactctttaaacactcaagtggtactagaattgaagtattaagaacaagtaaaagactgtttttgtgatttatgctgatttttcaaaattttggtgttttgtaaaggaaaagtgttgatggctgcgatgcacttgggcgctatgtatactcatgacgatgatgaatccttcactccatcgaattgaatttttcatatttgcttacgatgcttgtgatctcatcatgaacaaagcgccttttgctcatccgtggcggtggacgttagttgaactcgttaaatcttgcagcagcgccaaaccaaaatggaggtttgcggtagagaacgaaaagcaagaataatgaatattaacggttagttgtatgtaatattaggtaggatagcgttgacggtatgtagttttagtgtgagagtacgaagctgtatattgatttaaaataagaaaatgcaatcggtatatggtttaagaagttgcgcatagtcatcgatatgtttgattgagaaattgtaattatgcagtatgtagtttaaggcaacactagaatgcgatgctttcacagtgagctcaaaggctcctggcgataagttctgctcagtcatgattaatggggtactagtaactctatatttagttaataaatttattttttttttgatttatgttcaagcagcttaaagacttctttcacgcaagagaagtatttcttgaattcttaatgatattgcgatatgtagcttaatgcaattgatatataattcattgtaaatttggaagaatatcagataaacgagaaaggtgaaaccattccctatacaagctgttatacccctacaagtactttgcaacaatcctctcccgtcaacaacaaataaacaaaaaaaaaaaaaaaaggaagcttaaatgttgaaatacgattactctacttttacaattacatcacgttctttgtgctagcttgttgttcataaacataacatatattaaaatatatatatacgaattcgtcttttcctctccacgcttcttattcgtccttttcgttactttctctcatttcaacatctccttcctcctcaacttcgccatcagaaccttcttgtgttatgtgcgaaatcacaatcaccccttcattcaccaaacggtcgtacaacgcatgcaaaaataattcagctccactagcactttgcacttgctctaaactcaagttgcaaatttcacgcaacgactctgactcgggttttgcaactgcctccattaaactcgacaagtgcttaaaaaaatctcgattttcgctcaactctgcacgaccgctgatgcgcaaaaggtcggaaggagaatgtgggaaaatcttgggatacactctaggatgtgtaatcacacgatgagattctctgtcaatggagaaaggctcgacaaacgtcgtttcattcaaaatcaagggctgaagttgctctaataattccaacgtacgtgaatgagtataatcgatgttttcatccaaaggggaggccgttgcctcctcgtgatcttcgccattctcaccagctgtagcatgtggtccattcaaattcgactcacttgacgcacgatacatgtttgctgactcgttaacgttaggaaatcttggcaggatagccggtgcttcggctgtaggtgataaaacttcccagttaaagtcttgcagagcatcttggcttgctgcaccaaacagttgcagcagttggctggttgatgaatcatccgtacctctactgctagaattattatgtgagttgatagtccgagtcgtattcacagggtcagcaattaattgattgattaaggaagctgtttccttgtctttttcatcactatactcctgcatccagtaaaaatgaatctgcgaagaggatttaaattttagtgcatatacgcgtcccgtggtacattcatcaattttgataaactctgcttcttctggaaatatgatgtagtccttcattatatgttagtaaacataaaccaaattaaaaaaaaaaaaacgcaaaagtaaatttatatatataaataggtatactttgcaattgatttaaattgtcttcatacatcttctacttctctagaaaccctggccctttctttccaatagaaatgcaataattcatcagaagccatttgcatatagataactctaaacaaatgtcagtattaaaaatcagatcttttaactttataaacagaaaacaattccacaaaacccaacagtgtggattttcacgcatccttccaacgtaaacatgcaaagaagcttcataaacaattctttgggtagaatttcgttttcccagtagaaaggactactatctatattattattatagtacatacccttttcggtgatcagcttgcagaatattcgttcctggctttctttgaagttttccagcttttacggagactaatccatactttcctctctcgctagtctcgtttcttactcttccaaaaactgattccatttgtaatttattttttgtcaactcaaaagctcacgattattgaccttgtgaattgttgtggtatagttgagtatgcagtgtacacagtgcaagtgagcaaagtaatccacacaaacgtatcatgtctatagacatgatttctcaaaatcatttaattttctaattgtcgccactataatcatcttttatcatgtaatagacaatctttttaggtggttaactgctctaatatttgaagctgatttatcaagccgcatttgatggtttcgcctaaaaagatgttttaatagcaaattaatactacactttaaaaggaaaaggaacgttccactatgcagtggaattcatctcttaaagggccttgaaaagacataagccaatttttgtatcatcgttaatggcatcaatagtaaaacagaataaaccagttttcaccaattatacatagaagaaaatcaagatacaataaatgtctataatcctttcaggttttgaagagcaaaacataatcgagaaaaagtatgcgtcctacacaatggtatttcactagaaataatagaaaaatacattcatacactatttgaaattcacaccatataactcataatatacagacttaagttttttttattagagacagtccagtagtcgaatggtcaaatgaactctacaaatggttaatataataacaactcaggtattcaatatgagagaaaattcaaaataaaccttattttaagaaatattattagtaaaattactaaatcaccatctgccctcttcaattagcgtcaaatcacagttaatagattcgaccttcaaatacaactggtagttccaaattgcaaaaacgatcatctcaaaatgttaaactagcataacgtttaattaaagcaatgtaatcctttatttcaacattcttttcatatttctcttcattcgtccaaaaaaatagaatatcacttaaaaggaagtaagtcaataacaaattcataataccttatttatgataacaaatttgctttaattgatcctaatatctagtgtcgcaaagttttttagtttacattttcatagtcaattactggtagcttgatgatcaatggagaatatgacaaattgttaaaaaattatacaaatttccaattatttaaatctttgctatgctatttatctcttcattgttgtatgtttatgagtagttactctactcccttacactgtctttctacacccaccacgagtcatgtcctctagtcagcaaagtggcagagccaatgagttgaggactcctggaagagctaacagctcttcaagagaagcagtggattcttctccgttattttttcctgcttcgtctcctggttctacacgccttacaacaccgaggactacagcgcgtacacctctcgcttcctctcctttactgtttgaatctagttcaccaggtccaaacattcctcagagttcacgttctcatcttttatctcagcgtaatgacttgttccttgacagtagttcgcagagaacaccgcgctcgacaagacgtggagacatccattctagcgtgcaaatgtctaccccatctcgtcgaagagaagttgaccctcaacgtcccggggtaagcactcctagtagcttgttgttttctgggtcagatgcactcacgtttagtcaggcgcacccaagcagtgaagtagctgatgacactgtccgtgtcatttggggaacaaatgtatctattcaagaaagtatcgcttcctttcgtggatttctacgtgggtttaagaaaaagtatcgacctgaatacagaaatgaacttatgccacctcctgatgccgaacaactagtgtatattgaagcgctacgaaacatgcgtattatgggtttggaaatattaaatcttgatgttcaggatttaaagcattatcccccaaccaagaagctatatcaccagctttactcataccctcaagaaatcattcctatcatggatcaaaccattaaagacgttatgctagacttgttaggaactaatcctcccgaagatgttcttaatgacattgagcttaaaatttacaaaattcgtccttttaatcttgaaaaatgcattaatatgcgtgatcttaatcctggtgacattgacaaattgatctctattaaaggtctggtacttaggtgtacacctgtaatacccgacatgaagcaagcattttttcgatgttcagtttgtggtcattgtgttaccgtggaaatcgatagagggcgaattgctgagcccataaaatgccctagagaagtctgtggtgctacaaatgcaatgcagctaattcataatcgttctgaattcgccgataagcaagttattaaactccaagagacacctgacgtggtaccggatggccaaaccccacactctgtaagtctgtgcgtatatgatgaactggttgactctgctagagcaggagatcgtatagaagtcactgggatttttcgctgtgtaccagttcgtttgaaccctcgcatgcgtactgtaaaatcattatttaaaacttatgtcgacgttgttcacataaaaaagcaggacaaacgtcgtttgggtacggatccttctacgttggaaagcgatattgctgaagatgctgctttacaaattgatgaagtacggaaaatatcagacgaagaagtggaaaaaattcaacaagtttcaaagcgggacgatatatacgatattctttcccggtctctggcacctagcatttacgaaatggatgatgttaaaaaggggcttttgctacagctatttggtggaacgaacaagtcttttcataaaggcgcaagtccgagatatcgtggagacataaatatcttgatgtgtggtgatccatctacgtctaagtctcaaattttgaagtatgtccataagatagcacccagaggtgtttacactagtggcaagggttcatctgctgttggtttaactgcctatattactcgtgaccaagacacgaagcaactagtcttggaaagtggtgctttggtactgtcagatgggggcatttgctgcattgatgagtttgacaaaatgtccgatgctacacgttctattcttcatgaagttatggagcagcaaaccgttacagttgccaaggctggcattattactactttgaacgctaggacttctattttagctagtgcaaatccaattggaagcaaatacaatccagacttgcctgtcaccaaaaatattgatcttccgcctactctcttatctagatttgatttggtgtatttaatattagaccgcgtggatgaaacgctggataggaagctcgcaaatcatattgtttctatgtacatggaagatactcctgaacatgctacagatatggaggtctttagtgtggaatttttgacaagctatatcacatatgctagaaataatattaatcctgtcattagtgaagaggcagcaaaggaactagtgaatgcttatgttggtatgcgaaagcttggggaggatgtgcgagcatctgagaaaagaattactgctacaacaagacaactggaatcaatgattcgtctatctgaggcccatgcgaaaatgcatcttcgcaacgttgttgaggtaggagatgttcttgaagctgctcgcttgattaagaccgctattaaggattatgcaactgatcctgcaacaggaaagatttctcttgacctaatttatgttaatgaaagagagactttggtacctgaagatatggtcaaagaactggcgaatttaatttcaaatttaactgtgggtggaaaaactatgttggtcagtcaattgttaactcggtttcgtgagcagagttctactcgcttagatgcttctgatttcgaagcttgtctgggtgctttggaaaggcgaggacgtattaaggttattaccagtgctggacatcgcattgtacgttcaattgcacagactgattaattttttagcgaataagctggtattattcatgagccataaaccataggtcgttgttgaaaatcaaagactacagagcataatacgaatgtctttcttgttatatatacacacgttctttttgttataaaaatattttacatatttatcgagggatccttaacattcatttttcttttttttttcggcttttgagtatgaactgaacaatgagtaaacattatgaatataaattcgttaataccaaagttgaaataataataataataataattaacataaactttcaaaaaactaacagatatctaaacaatcgtaaccaataattcgccatgattcgtagaggcagtgtgtgcctaattttaagtattttcaacagtagtcagatgtcattaaaagaaaaatggatagcaatttaaccatcaatgtctgcagaaaattctctgcaataggaattatctgtaatatcaaatttatcgtcacttgtatccttaacatcactcaagcttggttttctagaaaagggcttttgacgctcacgcacattccaattgaatttatcttctaataccttggtccattggtatcctggattttgaatggttgtgaaagggtaatgagacgtaacaattgataaatagtcgcctctatgcatctccacagattcatgacggtcaacggaaaagaatgcactacttcgagaatccaaagggatctcaacgttcaaaacattgtaatctggtaaaataataggacggaaagaaagcgtatgaggacaaactggtgttactaaaatcgcatttagtgcaggatgtaccagagaaccaccagcattcgctgagatgttggtggatcctgtaggagtagctacaacaagtccatcagcttgaaccacagtcataagttcggaattgttgtaaacattcaagttactaataaatggatgttctcctctactaatgagtatttcatcaagagagtatgttgtggaagccaaagaatactgcttagttttttcatcgtatttatgaaaagagcactgaagccgcgaacaaaacctgagtgacacgttttgagttaagacctgatacaaatgctgctgatagttagataaactaaaatgagtcaaaaaaccagggacatcatcatcggaaaaggaaagaacaggtggcccaattttttgaaataaccacgatgtgtacaataatgtagagttgtcgccaattgttatagctaagtcaaaaatacttggtttaatcaaacaaatatacggattccaatacttgatccggtcaatgtcggtatttgcttctttagcgatgttatgagcagagaagcgcttggaacgagctagtctcatatccacatataccttggtttccggtgttccgattgtgagtatatattttgtgatttctgccgtcttgtaaactaacgaatgctttcgaggtttcgttacaactagtatattctttggttccaaggcaaaggagccattcgcaacctcattatacataagcctggaagcaaccacattctctatatgcatcgcagaggaattagaagtcctagattcttgatgaagctcaccaaagggaggatgagcgggtgaagggaggttagaagttgccaattctccaaccggtgtatttaggcccgacaaatcaaactgcattgaggaattcgacaagctgtcagcactgcattgtcgaaaatgaagattttttttcttcagcttgtttatttcctcaactttggtagccattctgattttctaaaacgaaataccaagcttatcctacgatgttcgctgcagctactaaacagtccaatttggattagtcaagtccctccaatttccaggttcaacaatattgtatctacaagtataatcgagtggaaagagattaaatattgctacatatgaatgtgtaggtatcttggtaaattctaagagctgagtttacgtaacatgagcagcatgtcctcaccaccaatttcatagttttgatgaagaaatttacttgatgattttatataaatataaaggctcaataaatattattatgatactttatggaaatgtatatgtacgaatgattttgatgtaaacgtttgtgataagtttttaattttcaatacttttattttttgatgctttaaaacaaataaaccactctctttaacaatagtatcacctaatactatacatagacgttttctacttcgttttattatgattgtgcttaaaagcgtttcgttttctaacattgagcgaacctgtttttgctcaagtaattaagcaagggctgttttggctgcagattctctatttttccaacgctacaatcaaaatgattagtaaaaggatagtagatggccctttctacaagcattcaatgcacaaggtatatcaaattcctaacaatcaagcggtggaatagtgcagattcaattgactttttatttttctgtttcatttatctcaatcttatttttctctaatctctcatacattgatattttgttaagatgatgaagtcttgaaattagatatgcaattcacatatcgttgatatccagcagtgttgggcggaacgcgaatgaacattttcgtcaattaccaagtacaaggaatgttttgttatttgaaaattttttttaaatcactcgcgatgcggaatgcatgaaaagctagccccattaaatttagatattcaaactttataaatgatgcgtttctagcttattctatctgttcttactcttaaatgattaatttcagagagtataggtgcctccattctataacaatttaatttaaaaaactgttttgaggtttcatccgaacattttgctatgcagcttgtttattactcatttacatttgtatttgctaatatattttggtcattgagtatgtttattgacaaatcaattcttcaatttacagcctaacttgaggaatgttttaagttatgcctaatgtattagatcctagttaatcaaatgaaataatgtaaatttcttcgtaataaaatttgtatatgattcatttttaataatattataacaaaatagaattaaaaaaaacccccaattacttatgcttgtttgcgattgcattgatgatttaagaatccgtttcgctaccgcttcaattctcttttttctctccctcctgaaatggatgctgatgattttggcaaaaaagacctagaaaatgggaatgaatctcctaaaaaacccatattcatgaaggattggaaaaattcacaaccgaatgagcaaggacgctggttacatttagatgctagaatgaatcgaaatgtatggtactaaacagcataagcacaattattaattttgaacactcattataatctgtgtaaattttaatcaattgactattatttcactctatttttaatactttaaaagaatgaggattgtgcaaatcgaaaattgaataaatatgtaaaaggagtacatactaacccatttattatttttgtagattgaagaccttgaaatttctaattacaatttacgattgatgaacgaacagttggaatcacaattactttctcttaacgttaagccggtagtcagctttgctgaacaaggtaagtcgtcagaatcgaagacggatgaagagggatttatccttaattctgcttccaacgttttggataactttatttcaattgtaaatgaacttgttcagcacgcagaagatgtcttggacgacttgggttgaatattttcagtggagataattaaggatttttaagggtttggaatggtgcatcgtattttaattaatgttacgagttctaaaaagtaagtagattgcttaactcgatgtcatctgtttactcaacttgctgagtttaatatctttctttgattaaatgattacattcacaaaaagccgggttttacagttttttcttgatatttttaattttgtttatgcgaagatgatttcttagcttgtttgcctaattaagtctgctaaacgatcgtgctttcatataattaagtctcgtttgaatcttttgtgaggctgttattttaataataagccctcaagtttaagttcgtaaatatatagggaaagcatttcatttttttacttcgtcttattctagtatgtcaattgatcgtttacatggtctgtatttcttgcagcatcaaaattacaccatactaaaaagtaaatatactatacaatatctttttgtaataatattttcggtgctcttaaatttgtaacgcaagatttagcctgttttgggcattcagtcctaacccgataaaatcaaagaaaggtgaaaagtgatagtaaggataatataattaattatagcaaaagcaaaaggaacgtactttttaatttcaatgaaattctgcaaagtaccacaacttcaaacccacctactactcgttaattgcctctctataacctttcctaatcccccaatttgttcaaatttcattgcaatcctctctttcttactttcaaatgatacataatagcctttgataatgttttctagaaattttacaaccccgtcaattcgaatttacctcaattcttgtgtgtctcaccgatcatttcataatactaccgtttcccaaagttggttaagtagaatacgcgatcgttttcgtggaacgaaggaagatgaaaaaaagcaaattgctgacaaagatatggctgccatgaaagtcgtgatacctcctaaaaagagagtttcaaagtggaaggatatacagctgtttgaaaaattcgcagaaccctcattaaacagggaggattcacttaagatgattaacgaaattaggaaatcgcttcagcttcaaacaccctggtctccagaagcacgtttacaagcagtaaaactagcatatcaaaaaactggtaggatcgtgtatgatgcccctctccaaaatatacataattgggatgatttatataactactacgataaaatagtagattatggagacactacacttcatggacgtttggcttggaagccgacacctggtttgatgtcgcttcccaatgtagttttgcatgttgatgaaaatggttatcctttggagagaaaaaaaagaaggttaagccgaagcgtagcttagttttgtttttaacttctatttacgacaattgttatgggtcctgctctccttttcaatttgttgtgtatatgaaggttatttgcaagatgagtgaagttttttataatcctttcttttacattcgttttttatataacatcgactctcaaacattttgttctgatgtttttttgacatttaaagttacaaaacttgttcgtttacacatgattaatacaagcaagccattgtaccgccggaaacaggtcgcataaaattgatagtatttatgagtaattcaatattgcttaaccgttacaaagtggtgcaccaacatttcgttatggtaatgctttctctgtgcttttgtggtacatttgaactgtgattattaattcattcagtaaattactatggaataaatgtaaaaatttaataacaatttgttgttgataaagctttcaatctataagctggtagctttgaaatttgctcagcaaatttaagtaagggcaagagagtgtatatatattctcaaaagttgaaaattttttaaaacaaagtagataaaagtattaaatatagccttcattttggaattggtaactctttaagttcacttctacttcacttacactatggtttactggctgcttcaatcagtaacccaccacttctttgatccaacgttttcaagtagaatacagccttaatggatcgtttgaacgttaaagaacaggagcaccttactcaagttttggaagctaagcaattaaaggaatatcttaacgtatgtacttgaattttagaatgtgtggttttaagttttgtgaaggctatttaaatagttgaatgaaaaaacttagtaagcaaacgttttatttatttgttcaatttaatcttggattgccttaagttttttatatccattataaagatgtcttttgaagcattctcaactccaaccttcacattttcttccaaatgttcgctttcattgattagatattaacatgaattatagatgtattctactttgactcaaaattgcttctcagattgtgttcaagatttcaccagctccaagttgagcaacaaagagtctgaatgtattgcaaaatgtgccgacaaatttttaaaacactctgaacgtgtcggtcaaagatttgctgagttcaatgccaaatacatgggtcagtaaattatgcatgatacgccaaacacatatccgaggtacggtgtaattggaaactccttcatcatctaactacacatgcttatctgttttcagtggtttaacaagggtgcattatacctcctgcttaaaaaatctaaaagatggtttatttgttcagtacactttcagagatgtgaagttgtctgggctttttttattcttaaaatgaaatgatttttgttcttcaaatttggaccatttattaatattgacgttaaggtttatagacaagacttgtatgtatagacccttcttgtttttaaatggctagtacaaatcatgatttatttggatcctcattacagtaatcgatgactatagatttatgaaacttgtaaaaaagtacgtctctttctttttcaaatctccctctttatttaaatcttaagcactagctaaaagacactcctgctttgcaattcgtaaagaatttctgtactaacttggaagatgctaaatgaatataaagtgttaggatactcttttcgctttccatacgcaatgtcaatgttccgcaatttgaccatcacgattccaattgctatgcttatatactacaagatcaaatctttcgtggacttttcccggccagtttacagtcctttcaaacttttagtctgcggacttcagtagtaaattggcttacatttttactacaaatgactttggactacaaccaaacttggaaaattgcctaactaaaacattttttcttcatttccctgttcacatttaattaaattaactaaaaaaccaattcaaataataaaattctgatttgtttatgtttttacctgaaacaattctatgggagtaacatcttgttacctgttttgaggaagtgaataggtacggctgtcacggtgcgtgtacgtaacattaacctaaaccagtggcatatatattggtatatatatctactttgctgtgtgctgctaattgataaaccattcccttcttctttatttatctagtgcttaaaagctgtacttcttatccatttgcaaaatgtttggaaaagtttcatcgcttttggtttttgcttcattcttgatcattcagggtgctttcgctactttggtggctcccattggagatctcgagcatttatctgaaattgaattgctctacagtaagtacattgaggctatgtaaaaagtttgctgtccatccaactcgtgcacttaatgttgtataatgtcgtagaccgagtttttgtcatttaatcattgtttaaatattttaatatttaaactttggtattctttttacatcccttctctattctctatgtctctgtctttatattttgtgactatgtgaaatagctaactcagtatatttagctaatcgtgttttgccctcaaaaattcctttgaccccatttgttaagagggatgatgattctagttcaactcaggcaagttactctactactgtgagcgatgttgtgattgtcaccgacaaatcttggtcggatggtgtagaaaccattttgtaagtcatgcttgtcattttatggaaactatttgtttgtgtaaaattactaatattatttttagtccttatagttacaccgaatatcaaccatctactacttacacttctgcacctgccggatccattggatacgcagcatccattcccaatacagggcgcgaattgatggagagtgggtcccctgtccggttttccaagagttcattattgattgtttcactcttgagcattgctgcttttgccgctttagtcctttaaaaattcaaccggaacctaccccctaacattcacctgaaaatttctctttagggattttctaaacttagatatagtttttgattctactttactcttttaaaatttttgttgctacttacactgtcaattctatatctgcgctcgataaccggtttctttttttaggcgctttggcaaactcgtctcatccctttaaataaaacacacaaagggagctctctgtgagaaaattcaaaactctgaagaaacatcgcttttactagtgaggagccttctagaagtaactacgaaaagaatttgcttttctcatgggtaagtaagggtttgcctacagttgagtgagtcatcagtttcaacaaatttcgttcttttcataaattcattgttcatgttttatttctgttttatatgttattttattttattttatttgaaaatgttttttgtttttcagttctctttggatttatatacactttgaaggacttgtacgaagcgtccagtgtattaaaagtagagcattggtatacaaattgcttttccgttaaattgctttatctttttttttcgcttgttgcacaaggaactgaaattttacaaaacgcatcgtacttggaagttgcaaaaatctgatggaaggcataaataaatgacttgttttgtaaagaggatattgcaatcctaacggtggtatttacatgcttctataattattttaaaacaaataaagttaattggtctgctaagctacacatacgcgtaaacggcattttgcgtttgtccgcagataattgtcaagataattatttgtattgttttgctatatacttcgttttgtaaattgatccatttgagtgctgtttcttgacacgtgtagtataaatcctatgtttcaatttaggtcactacaaacttgagcaagttaccacttacaagagtacaccagcacttttaatttctctatattaatattccatctttttgacattactaagttaactaatttaatagctgatatgtaaaacaccattgcaaagaacttttatatatagtgcaatcgtacgagaaaagggtctataatttttgatcattatacgacaaacctgcgtaatgtgccgaccgtatcggtagctctccttataatattttatcgaactcacgttgttctgccgcaaaaagctgctgtcttgtaccacttgtattttaggaatacggatgatccgagctggccacatctactgactgccaatacgacctaacaaagggaatatcaaacgaaagcatttttgacatcaaattttatttcattgactttaacgtatttagtgctgtcgattggtttcaatttcgtcaaaatttccgcgaggtgaaggcgactttgctcaaagtcgtaataccaaaatcggcttagaaatcgactttatcaacgaagcattcctttagtagggattttggaataaaagagattgcgatttattttgaattttaaaatcaacacccttgcttactacttatcgggattagatttctttgacgaatttactactatactgacattaccaaacgcctgtatcccctttcgtttattcaaaaaaaattgcaacttgtgcttactttttattttattttttttttggatttgatttgattgttcgttcgtattcgcttactggtacacttcccgtttttgtcttcgaattagtccataaatacgttttttgttagattgaagcttttttgcagcctcgttaccttattctttatcattttcgttatattaaaagaaaagatagagggaaagcgagcttttaaaaatcagttcattttttttttctactccaaacagacgttaccgaaatgtcctggaaacttacaaagagtatgtattccataatacgggttatcacactctgtctttctttttcatactaacagcttttcgctttttagaattaaaagaaactcatctagcatccgctattggcctgaactctggcggctctagttttactagaggtctgaaaaacagtactttatcctctacttcttctcgtaaatcaagtgatgaaaaatctcggaaaagctcggaggataaacggtctccccaaagtaccgtcgtgcagcctggtttattgcaggtcacaattatagaagctagaaatttaaaattaccgtcgggacatgttcctgccaactacggggtttccattgacaattctttacttgcccctccacttagtaatggctcgggacacgcaaggtctcgtagtcatgcttggtggttaccttatatcgtcgttgaattcgacaaaaatgaaatcttagtagatgctctaaatactgcaagccttgaaaatccttgctgggattatcaggcaacttttgacgtttcccgttattccaaactctccctgaatatttaccttcgttcttcatccagccgctcgcgcaacggtatggggaatgacgctttcctaggcgggattaaactgtcgccttctttcattgtaaacaagcttacagacgaatgggtacccctgcatgggggtagcggtgaacttcgtgttcaaatgctttacaaacccaatcaaagtacccctttaaccattgatgcatttgaactattgaaagtggttggcaaaggctcttttggaaaagtcatgcaagtgcgtaagcgtgacacttctcgtatctatgctttaaaaactatgaaaaaagcccacattgtatctcgcagtgaagtagatcacacattggctgagaggacagtacttgctcaagttaataacccttttattgttccattaaagttctcctttcaatctcccggtaagctgtatcttgtcctggcctttgttaacggtggtgagttatttcatcacttacaaagagaaggctgttttgatacatatcgtgccaaattttacattgctgaactacttgttgctttggaatgtttgcatgagttcaacgttatttatcgagacttaaaaccggaaaacatattattagactacaccggtcatattgctttgtgtgattttggactttgtaagctaaacatggctaaaaccgatagaacgaatactttttgtggcacccctgaatacctcgctcctgaattgcttttgggtcatggttatacaaaagttgttgactggtggactttaggtgtgctactttacgaaatgattacaggacttcctcctttttatgatgaaaatataaacgaaatgtaccgaaaaattcttcaagatcccttgcgattcccagacaacattgacgagaaagcaaaagatttattgagtggattgttgacccgcgctccagagaagcggctgggtagtggaggggcgcaagaaataaaaaatcaccctttctttgatgatatcgactggaaaaagttatgcgccaagaagatacagccaccctttaaaccaagcgttgaatcagctatcgatactagtaattttgattctgaatttacatcggaaatcccaatggatagtgttgttgccgattctcacttatctgaaaccgttcaacaaaggtttgccaattggagctatcaacgaccaacaaccattgatacatccgacgacattaatacaatagcacctggaagtgtcattaggtgatgaatttgacacttctttgtttattttgaaagttttctcatttttactcatacatgccgcttttcttgcctcttttacatatttgtatgttataaaggccaaagcttcgttcatttctcattattgtcatctttttttgtcgtacaagatcattttctattactattattattatcattattattattattattactgacaacctcaagtctttgaagattatttattttttgtcagctgagaaaaagtctcagatattgttggatgtagtgttttttgttcttgtagtttccgaaattactagtgtagaaaattgatggaaaactctttttaattattaagcataagaacgtaacggctattgaaaagggaaaaaaagacggagatgtaattaaaggtgaaggggtaattagtaaaattacatttcaaaacgtaaaggtaataaacaagagtaatatgaaaaaggtaaaagaaaccagtacttttaggttggagcgccaatccaccgagcattatggaagaagtcgtacacctgttcgactttattagcgtctaagtgtttaaataaattaactgcatcggttttttgaaatggttttttggaagtcagtgaagccgatattaaggcaaattttagagccaaaaatggtttagggaaaatctgcagttttgagcaaagcgcttgctcatcctctgaaagcagttgccgatcagcggaagcagaaaacattgtgggagtcgctggttttcgaggaacaatcttttgaatgtcacgaacttgaaaaggagcggaagtggtttggttaaacgacttaacatgcctcaattgcttatcatatgaagcagaagctttacttaagaggaatttttgcgttttatcgcgttcatatttatgtccttgttcgagtgtagtaagacccatctgtcgccattcctgtaaatcagaaatttgtttttttagggttatttgctcgtgatagctgttcacgaacttttggtaatcagggcccgtcaaaagtcgagcaaatgcttttgttttattaagtaagtttcgttcctcttttgacatgcgcttctcattcgcctgtagccgtcgataatctaaaaggttgtgattgaaaatggtttgtttacgaacagcccgacgagtaagacgggaattatatatgttaagcatagtcagcttaagttgcatttcatgctttgctgactcgtgtaaatcgtcatcaaaattcatatcctttatgggcagttcagcttcgttcatgtactcttgatcaaattcaagacggcccggcatatagccttggatttcgtggcattggggtgtagatgctagaggcttttgaggaataatcggtggaggctgaaaagcttcaatacgagctcgtttccgtgccgcaaatgctatgcgatccaccggtccagggagctctacgcttgctaatggatagcaatccgactcaatataggttttcagataatgatcccgacattcttctttcgtccgagcatttcccacatagtctgcaatgtcagcccagtttccaaggcccagtgtttcacaagcatcgattagtaagagttcctcatcagcaccccaattttcgtcgaaaatagggtatgaattggtttcaataatcctatacggatgagacggatggtgagttcctagggaggcaccagatgtaaagcaggggatgcacaaatcgaagtcaacacattctacgcaccgaatatgaatggatcttgttatatcttgggcgcagacgttgcaatgatacttttgaggaggcatcctgcttcatgtgcaaaatttttcgtccctatatggtggagcaaagtgatgatccgatgcgtagaatatcaaagaagcttgagtaaaatgagaagtaaaagttggatttcaaatatgaaaattagatcattaaacttagaaaactcttttgaatacgatttattaataatggtggctgaagttgaagtttttgacttttcaatatcaccaccagcaattactaaatacgatcgaaacgtgattgcaatcagaaaataagttaaaattcattcactgaatagttatttttgtttaataaaaaaatctgttgcgttatatatggtttctttaaccggaagacggcttctgtctgtcgataaggtagaatcagaaagaactaactcagagtattaaaaaaacaagaaaaaagcaattccggcttatcaaacgaatcgattctgtaaaaatatcacaaagttgacatttactggattgaaggtcttttcttactgccgaagcgaatgtttatttccctttctcattttgaagagcacctgcactgtcttgtgctatgcgactaacaggtccaaggtttttctctatttatatagctatgatattataatttcaaataccatgttgccttttggaacagttttattaaaagcgttttatcacaatatattagcagagaaaactatagtaaatttctacgaacattttcacggctaaaagtcattgatttaacattaacggagttcaatgctaatgaatatggctttgttgtcaattgctttatgtttatatcaattacaaaaatcagtaaaatagatcttaacagagaacttctctgcaatcacgacttgatgaataagagaataaaccataaatatgctatgtttagttagcgtatcaaacatagtgaaacgtaaagttttctggactttttatcgttaattagattaacacaactctatagtgtttgtggtaattggatcttaaactattttacataatgctttagtattcttaataattattatatcgcgctacgatactttgttttacttaaattagtattttgtaataaacaagaatatctttattcgataaactaatttggacttgaaagcagtcacacagtacaaactcaagaattcagtgtagtaaactcatcacaggaacagaaatggtaaggctttcaatagaatagttaagaaaccggtttgaggatagaaattactgacaaaacatagggtcgtgtacgcaccaaaactacgaagagagcttctcgcgtagttatcgagaaatactaccctcgtcttacattggacttccaaaccaataagaggattgtcgatgaggttgctatcattgcttccaagcgtctccgcaacaagattgctggatacacgactcatcttatgaaacgtatccaacgcggtcctgtccgtggtatttccttcaagcttcaagaagaagagcgtgagcgcaaggatcaatacgttcctgaagtctctgagctcgagaaggacaagattaacgttgatcaagacaccaaggatatgcttaaagctcttggctacgactctatccctactgtcgttgtcgctgcctctcgccctgagcgtcccttccgttacagacactaaataacattttaaaaaaaataagatgtatgttcttttgaactgtcacggttatttatttttgtgatgcattttgtaccatattgttgtatttgtattcatttcgatttgtagacagtaaagtaggtacgtaaaatcgctcctctagaagctcggtagttaaatttattgtacatttagtttagacgatttcaattttttcatttttgtttttacaatcttacaaatttactaagaccgttcgttgtgaatatgatacctactgaagatgaaagtgcaatgggcagaagtcgtttaataaaataattaaaattggctgttgtacaaacgctcaatatgttgacttgacatattaagagaaaaggaaactaaacggtagaataataaaacaattcaaattatgataaaccctgagacgtaaattcaataaatactttttctaataaattcactcgacgtctataccggaaacattttgtaaggattcataatgataaaagtcttccgtcttcaaagacctcaaaccgcctgattgtatgtcatatttgattgcttccaaatcatttccatgcttgtcaaaaagctctctgcgtggaactgataaagcagatctacagacttccttgatatatgagccagacagtccagcagtggcattaacaactccattccaatcaaagttcgcttctaacggtaccttttttaaataaagttctaaaatcttgcgacgctgttcggcatttggaagaggtatggagaatactttaggcatacgacgccgaatggcctcgtcgatgtcagctggtcgattagtagcacccaaaacaagaacccgtgactgaccactcaataaaccatcccacatcgacataaattcagctttaatttgagccattgcttcatggtctgtcctttggcgttgccgcaagaaagtatcaatttcatcgataaatattatagtaggctcaagcttacgagctagtgtgaataatgcgtccacaagcttgtttgattcaccgaaccatttgtctgttaaaaggcccacactcacatttataaatgtagcttgactttgcttggctaatgctttagctagcattgttttaccacatccaggaggcccgtacaagagtaaaccctttggacacgacaaaagtccgccatgggtgtcaaacacttcagggtattttaaaggaaaaagtacatcttgcaaaagctgattaacatgttcatccatacctccaatatcatcaaaggaaacatcgatttcgctgggtagaacgagctgtgatgcaacaatctgctcatactcatttaattccagagtctccaattccttgacttgttccccagcccactcatcaagtcgcttacggcttttggaaactgtatcctgccttttttgtcgatacggatctaaagtagacaaaagtttatgtgctgcgtaccaagagcaaccaaatgctaaggcatagacaacgatctctttaattgcccttttagtcgtcggattcataatcaattccccagtaataaacttcaaaatgcaagcacacaaaattttatgcagtaaatttgtctggtggcacgctactactattggggcggttggtatgttcagctaaatgggtaaagaagatatacaaagttgatcgtactttgctacattgtttggaaaatatattcattgaaaaaattatttttaaataaaaaattttcattttcctaaagaaacaatcccaatggtttcaaagcgcagttatcaattatcaaaagtggtaatgtaacaataaatatttactctctgtgccaaaagatttggttatagatgaaataacaattagtaaacaataataattaagcagagattttttctgagtaaataacccattgaaaaatgagaataaaaatggagcgagaaaccttttaggagatttggatatacttataaatatccaaaagggaacctaacggaactatatacaaaacaataaaggacatatcaagactaaatcgctatgcccgtccagtgaagctcactgtttaacatatcctaaacggaaaaaccattcctatcattcgtaaattcacgaaaatttttaaattatatacaattttttcctcctaggatttatttggccttgtattgagtcgaacttgacgacgaaggattttcaccttcactagcaatgccttcttctgaatcagattcgggattactaggaggatgcaatatagactgtaggtggttcatttgctttaaagtttcatcaaaaatatcttttctcaaattccatgcttttacataattcgcgttttcttcttctaactcacgaatagcatcttgcaactttcctattgatctgtaaacccggtcagtctaaaatattcaatataaatctggaaacttactcttgttgttctgttcttgatctcaatccttttgacattattggcttggccaactcgtcgtattgttcacgctttcttaattcttcttgggcaactagtaaatcttgctcaagctggcttatttcggttttttctgcttcacaaaatgtttctgaaaatattaataaaaacatcactgtacttaaagttacgaatttaatcacatacgagtcttcttcagttctccttcgtaaacatccacttctttagcattcatgtctaattgcatttgcaatcgaagccaaaaagcagagagagcagaaaattcaatttctaaatcccttaagtttgcttcgtctacattttgagcagcaaaaccaagacaccgactaatcaaccgtttcaaaggccgttcttccacagttaagcgcgatcgaatcgccgtctctgacatatcggttaacttaatattttcaaaaaaaaaattatttatagcataccctccataatgaattgagtaaaaaaaaagcaaattcactatacaatttagttgggcgctaagtcagtagctggagtgttcggagttttagtcaccgtattttaccgatgtttaccggcaaaaagttattagtacgattattacctaagaaatgtaaaaacgctaacaaggattgcagtttgatattgctatagaacaggcgggcaaaatgattttacctctttttccagagacacaagttcatgtttttgtatatgaaaatgtttctaactgtgctgcgattcatgaacaactaataagccagaatcccatttatgactatgcgtttctcgatgccgctactattctatataaaaagcaggtttatagcgctattattagggctctcgaagatagaagggacgaacaaatgaaaactaagacgattcactcagaggttattttgtcattgtccccaaaaaccgaaatttctagtgcgttccgacaattcagcatgacaaaaaaatctaaaaacattgtagtggtaaaaattgatagcaaacttacagaagaagaagaatttgagcgcttggacaaacttgtggaaggtaatagggtcgaattttctgacgaagagttacaaaaattaatagacttcaaggtgttaaaaaagaattacaaattggatccctctacgcttgagaatcctttggcctctatattatcttcgatagctctacgtggttattcttaaaaacatatgttctagcaaatctgatcttttgtcaatgtttcacaattgatttgactatttttctatgcggcttgaatgataatgatgagagttccaaatggaacgttgtgtggattcttctattccttataattttttcctctctcaaatgactgtacaaactatttagcaagcacctacataatcaatttttgatttacgaattggtaaaggatggcacgtaaagttatgccctctggtttggttcagttttatgatctcttgacagttttactaaagtaactaagggcatttcattacgattatctgtttcgatacttttacctagggaatgctttagtgttatttgacatcatgttttgttcttgtgcaatattttttgctcaggtctattggcgatgaattactatatggtggatctcagtgcaaaaagtttaccattatgtgaatagttattaaaagtttaatgggattataaattaatgggttttttattgcgcaccttatgctcctgttataaagaaaagcaggtcgcaaaggtaagaactatttttatacaacaataaaggtttttacatcgtatgttttacaattaactggcagctctttgtcaaaattgtttatttacggatttaacttgccttcttgcggtattgactgctaagccggaatttgtgatatcaagccatccgtttcccagtcacgcgaaaactcttccttatggaaatttcattttaacaagtacaaatctgttaaaactacattcatataatcatatgcaggcagccgattagagaaaaactaaatttcttaggcagaattgtcattatccgtcaataccgcgttttttttattttccgctttgattttttttatcattctttttggttcttttatttttgtttttatttgttttgttttctttttttccttttcaaaagtcatttgaagacaaaaactcaacgttgaagagagcatttgttcatctgttgacttttcgccaatacacctgtttttttatggacttgctaagtatagtgtaaatttaacgctgtcgttgatccgtatgatttcttttgattaatttaaatcgttatatgtgacactagcaatttttgcttcatggcggaagagactgaagaggattatttagttgtgggtcgtgattacttgtaccccccagatcatgaactgcactatgggtttcatgctcgtgtgattgaagaggaggaggagcgatttgtagatgatacctttgatgaaacaatcgaaggatcggatgactccgaatcaatagatgatacggaagtattttacgatgctgaagaatctgaaagcactcacccttctgcttctttcaacgtccttgctgacgccgttgcgctttatgatttcgagcccctccatgataatgaactcggttttactactggtcagagactttgtattttgtcggaatccagcgatggttggttgattgcatacgatgatgcctcaggaagaagcgggcttgttcctgagacgtttgttaaattagaggtataaaagagcgttgaattgaaccctttttactttttctttttgtcaaattgattttaaaatgttattccttattttatgttccaagattttctggatcctctcctttatatataagaatccgaagtgttacgggaaaaaaattcggattgtcacgcttcttatgaatattatttaaatgtacgcctttaaagcaactatcatacaattctcctttgggtaaataactaaccttgggatgtgtcgtaacttgggacttatttttgatttgttataaggatgaaatgaatgttctatcttatggaccttacaagaaaaactataatattgtcaaatataatcatatgagatgagttaagctacataaaactctttgaaactttattttatattattgcaaccttctaataactttacatcttcttatccaaagaagaagggttagaatgtaccgtgttttacggaagttccattcccgtagggttacaatgtgttgctagaataaaccgtaagtcatagtacatatagaggccaattctgtaaacttttttaaagtctatggaaaaccctctatgtgtctccaatagagaacggacatctctttctgattagtatatacgttttcatagtctcttcatcctgaggtaaattgtacaaaacgctgtagttaaacatgtgatcgagttaaatagatatcttcatagttcaatataccattagatttttttaaacaaaatcataacgagtacgaggtcgttttggagaaataatatctgcaaatgctgaacgttttcttggtgtggaaggattggaagacgaggatctttcatttaatgcttccttgaaccaagtcttgtcattcaataaagacttttgatcacgaataatggacattaacgatcctggactagtgtcggtttctgactcgaataagtgatgattgataagaggaaaccataccatcttggcaatcgtctctggtggagtaagccaaagggtccaattccattctaagaaaatatctttagctatttttgaggtacagaaaatttttaaagatccctcgtcatttgagcctcgtagttgaattctactttcagaagaaacattcaccagcacttcagccagtacatcgactaacgtttcaaacgtttgaaatggatcgataggacatctttcgctctgtttaaaagttaatataactcttggttgagagaaaggtgttaatttggttgcatttataactgcttttcccctgaaagcatagtagcaatgtagttgttaactaatcttacctctgcctgattgacgatttgattgcggctacatgtacaggaccaaacacgcactaggtctgtaatatgaatgacttgtacagcctcattactttctgcgtcgaagctagcctgtataaaatgaaacctgtggccacgtagctgcacccaagacatcaagtataaacaaatgcaatgtcttgttcagtatctcaaattgattataacagcaattcaattgaaaatattaaagctaaatcactaaaatagaagaaataagctcagcaatggtcacagttgagaattcgagtttgcaaagtagtattggtattgatgagaaaattaaacaaccgatatatgccagagtaaacaataactatgccaagttattctttaaactttagaatgtgaaaattagatcaattggaatgcttttgtaaaatattgtctagtggtttgaaagtagccagcgaaagacaacacaaacaaggacagaaaggaactaccaagtaatttgagagctatttttttttgaagcttaatttgaaaacgaaaaaattattaagtagataagaatgactccgttcggttttttcttctgctcacagaatttcgtggactaggggacatttcagcggtatgttcagaagaagtattgtttctaatttgagaagagatatccattctggataacttcaaggccctcttgttccgaagattgacctacaatcatcatccgtgtttacatgtagctcttatattctgcacaagcgtgctactgtgtttatatatatatattttttctaactaaaagtatatatatgtttgctattgctacttcattgtaacgtcaatggtaaatgaagaagtatgtgatataaaaacgcaaattaattatgcctaactcattaacgactacgaaacgtctgaaggtaagaggcagggaaccacatacaatgaatgtacatactacttccaaaaggatttcgcattgtttgttagaaagagatgaaaatcagagctcttagtttttttgaagcaatgtcatttcttcttataatttaaactaaaatcagaggtgttcaacaaaaaggtctcgtggcccaatggttaaggcgcttgactacggatcaagagattccaggttcgactcctggcgggatcgacctttttgttaaataatttttttgggtttttttgaataattcaatttgaaaatacacaaccgttattatttataaattcgagtgcaaaaaggatgtatgaacttagaggacatagtcagtatatactgagcgggatttacattccacaaatgaatttcatcgactacattaactactcctgatttacattatatattactaaattactaactgtgtgtctacggccatacctaggcgaaaacaccagttcccgtccgatcactgcagttaagcgtctgagggcctcgttagtactatggttggagacaacatgggaatccggggtgctgtaggctccttcttttttatttactatttgcttggcttctgcagttaacaattaggaagatgtacatatacataacaagtttgaaagcacttatcgagatgatttgcaattacgaatcatgaaaactacagcagaagttcacggcttctcaggctacaacaaagttctacttctctgagtggatcatttttaacaaagttgattaattaatttttaaagaaaaatagatatttttcctttccacggggcatttcaaaggaaaaaagaatctgaaatacactttaagaaaggagtttttttctccccatcgtattcaattcggcaatcaatgtaacttataaaagagactcagactgaatcaaattcgatgggtgcaactttcaaattattctaaagggttcatgccctctatttatagtaaaaagagcgaagaaaaaatttttgaacacacgaattttacacacaaactgcacaacgctttaagtgtttttctaatttaaattctgataaataacaaatttgaatgcataagctcaatagactattccctctagctggatctaaaactttgacttctgaaacaaatgcacaagaaacagtaatatcattcattattgttatattgttataacaaggtttgattcattgattttgttaattatttttatacaatgaaataaacagaacaagatattaacgaacaatttattttacaagtgttttgtttagagaaattaacaaacaaaaagaagaaatgatcacaaataaagtattcgaggattgggagaatgactatttcttaaagacagaacaattaaccgatggatcgtttactaaggagtccttataataataaaatttaatatcgcaaaattcagcgaacgctctaactggcactaattagattgataaatgtagtcaattggagctttgtaaactaatgaacaaacttagaaaccaacggacgtttattttagtgcttctcgtacatacgatatatagtaatatgtaacatcgcatagtgtgttgctaaaatatcagttttaacgagagtgcgatatacgtctttactgagctttatggtgtcattaatcggggtcgctctataacaaacgcgtgaaactaggacatcaacaatccataagtactagcgtattgagatagtttctttagtattttaaatctgacgctttataagtattgcttcttttttacagaaattctattgtgctctgtcgtggacgctttatagaaaaaccgtgtattaagaaacaaatcaccaattataagaatttgctctactattgtttaaatctctcttcaaaactgggaatcgagatattatttaatatctgtttctacttattgaaggtatgtaatattttttaagcgttcatgcacagtgtacgcaggtaattgctttgtttatatgcacacatgcaatataataatacatttggctaatatatacaaaattagacatcttgcttttcttcattgtcccaaaaaaaaatatgctgcaaaattggtttttccaaacttcaatcattgtgtgaactcgaatatcaagtagggtttgttttatgtgattgttcaagcctttcctacttttaactatttttatcttttattttttcagttgatgctttcatattagttcatcaatttgagtattactcgttcatgtatctgtatagtagactgcacgtacagttgctttttgtcacttgctagcaatggatcgaatggaaatagacgaccaggctggcatagattttgtcactgagtccatcaactctgaacgtgcgcgtaacagatggtcaacttcgcatattccttcattaagtgaaatcaatccctcctcttttcaatctccctcgccttctccttttgcttcctccacttctttagcttccaaaccggctcgctacagtaaacctttggggctttttgtgcttgatacaaatttccttttgtcgcatctgagcctttgtcaaaaccttattgaatttcttacagctcgttgccctcgacttgttgtcgtactaccatggacggtccttcaagagctagatggccttaagtcagaatcctcctctacttgtggttatttggctagacaagctcataactttcttttgcaatgctttcgatctaatgtttcaagtcttcgtgggcagaaagtacatgaacactgctcatctactgaaaaaggtgatgacgctatccttgattgctgcatatactatcaagaagaaaaacttattcctgccgtccttctttcggatgacaagaatctcagtataaaagcggccgttcatcatattcaatctttatcgttctccaaaggccttgaagctgcatcgatcgttcagacatctttcccttctgctttttcttcgaactctgagaacttagagaatttgtcgatggatatcgatttgactgtttcacaacctttagctacagctacaaaccatcgtaatcaaggagcttcaactgtagatataccaatggatcgcacccatgacaattccatttgggcatcccgttatgcccacttccctccgtacgacaagaagaaagacacaactagatcagcagccgattacattccatacacttacacggcattaacaaaggaggagatacttcatgcatcacatccccgagcctgtaagctgctagaccaaattacaaaaataatggtagaagagactgcatttctactttcccgtcaccttttgaaattatggggagattacgacttggcaatgacaaagcttcttgcgtctccccaatttcctcctcaaaatataaacgatgttggacatgagctgtatattcactggtatacgtgtttcgatggatacttaccagctcaagaaagatcaaatttaaaatccaaagccgaattatggaatgaatggatgctttgggcggagcgtggtattggaattgggccaaaaaatcaagaggagttacaaacttacgttactttttggtctaatatttggactctattaagtagacgtgaaattttaggagatcaagcatctacctatataggttttagggagcaaaatattgaaaaatgggtcgaacgatcaggccgagaacgtattttatcttagaaaaaatataaatattgctaaattaatacattaatgaaaatattcaccaactatatcctttttttgtagcaccaaaaagattaaaagtacctgtatggaaaatagaaaaggttcatcaacggtataactaccctatgagaaaacatgcatcaaccgaaatgttttgagatgtaatatgtacaatgttaacactatattaacaacaaatattagaccattatgtatatgaaaccgctgttcaccataaacaaccgaaaaaaaaataaaaagtatgttaggaagaaaaaagagaccgcgcttttagtttttattagttcaattactggtgcttagtttcggttgcgtcgcaaacccacagcgagtttacctatgaggattttgagctttcgataatttcaatgacagcacggataacctgtgtaaaaacagattggacctcaggatcattcggaaagtccccttgaaggtttatgctagtgtagacttgagcttgaaattttttggagaggatccgagacatttgagtagaaagatcgtcaattgagccagcaccagtaagtttggtagtaacgacatccgatttacctggcatggaaagggctaaatcacctgcaggacatgttgaaacattgcttccccatacaaagatagaagaggatggattcagctttatgacttgtatccatacttttggtatcattgcattcccaaaatcaagttctttttggatgacttgaaacatggtaaaacaattatttttttttaaaaattcaaagaaagagaggacaagcaaagtgtggctttaaaatgttggcaaaaatattatgaatacaacagtaaaggttttcgaacaaatggcaagttcatgcaaaacctaattaataggagagaaaaaaaaataaaatgaattgatgttcaataataagttaaatacaaaataaacgaagttttggagaattactagttatactctgaagacaagaatgatttaataatttccacagaaataaggaaagataccgtattacgttttttttataaagacatcgtattttttcttaagcaaatttaacgtagcgtcgcctaatttcacagttgtgctttgtttatgcacggttgccctccaactagtgctttgtacgtttcctctaccatagacctcattcttgctgcttcaaagagcaaagagctttactttgcaaaatggcgttttttaacgtatttaaagccgtgttatgtgcttattttatatctgttgttttcggtcatggcattacattgaaaccgcatcaacgaggtatgtaatttcagtgtatttgtgttgagattcatggagtatacaatgctaatgaagcaaacttagaatgtttctatgaaaatttgaggaataatgatcaaatgtctgtcacttatcaaacaaacgttggtggtgatcagcttgtttctatgagtatctacaatcctgcgggtcaaattatgcatcaagaggttcccaactctatggcccaatattctttcaccgttaagaacccagggaaatacatgtattgtttctataatgtatgtgttatctttttgttttctggcatcaaagcctggcattatggtcgtcatttcccatgtcgtctaattgtttgatggttgagccggaaacagctagatgtacaatcttaactaacaacatcaataggatgcactcgatggtgaatcaaaggaggttttattcaatgtgcatggtgttatatatatctctgatgaagatttggatgctaacaatcctttactcggcaaggtccgccaactccatgataccatctccaaggtaaaacatgagcaggagtattttgtggctcgtgaaagaatacatcgcaatactgctgaaagcacaaatgaccgcgtcaagtggtggagtattcttcaaaccgttattctagtttccgtatgtgtattccaaattttctacttaaagcgacttttcgaagtaaagcgtgttgtatagtttatccgcataacgttacttattgttcgcaataagttttccgtgcgactggacgacggtcgtaatttcaagattctgcttgagcagcaaaaagtattataattggtctctatttgaagctggccatcaccgacgactaaattttttttaaaaaattttatttcctgtcggttgctggcgttttccctttcaatctgaatctttaatctgtcttttacttgtgcaggttaatgttttcttttatgatctcgcctgttctttaaaaaaaaagattcgttatgtttgaagcaatcatttagcaaacgtacgtgttttttaatgaattttaaagtcttaatttcttaaatcattctgcactgtgggaaacactgcactttaactttcacattttatggcattccgatctttctaaaggtacactttttttatagacggtaacattaacagtataacaattccctcattatacatttgcttataaaacgaattatttagtctgtaatgccacttgtatgtattacttattgctgtattcatggcgatgtttgttacctccttctaatgttaccttcaaagtatctatgaaaattcatttactacaccaaactataaccattaccatttatcgtaactcaatggcacaaggagaatttaaaaagaagaaaaatagtagtgccaacaagggcggacgtgttacaaaacactccaagaatcctaaaaaaggcggtatgtcagctgcaactgtcaaatattcggtgatctttgtatgctagggaatttggtttagggatgtttcttttaatattttaagctcattgaagttgttggacaacctttgtggtgctataaactcttcatcttttcgtaactttagatactcattatagtaaaatttttcattaaattttttgatacacgtttcaatcattttactcttaagcatacaagatatcatattatatggtttatcattcatcattaatactcattactaaccttgacttttagctcgttattgtgcccctagaagagcagctgctatcaaagaccatacaattaatgcggtatgttttaaaatttacttttatatatgttctttttgctaatatctttaaagaacattacaaaaacattaaatgttcgcaatgagaaactaattgccggaattgcgtctcaacaagtgggcaagttgacaattactaaggcattaggtgaagctggtgccaaggagttaaaggagggaaagcattgagtcgtttggtatttctttttgtgtaactgttttgttccttttcaaaaggaggtaaatggctacacttgatcatactgcatttatcgaattgtagcattggttttggaattttattactattatggttaagtatacagggaattcggttcatttttgattattatttataaattaattttgttgggaaatgagtaaacgttatatacaaatattgttgtttgataattttctttaaataattagactcagtagtgttccaaataaaaagctcgtaattctaagattaataattatgttccacaaaaaaaatgcttttaaacattcttaagtcctcgttcgtttgtttcgcgataagtttacagaagtagttttcgttttggagttctgtcctcgcccagaatttgactctgcatttgaaatggctttatttaaaattctccactcctgctgccatgtgtcgagtaatgttctaattcttttaatctttactcgtttttctggagtatcttccggtgggtgttctcttttaagaaaatcaatcagctctgaaagctctttctctgaatcggaagattccaattctattctctcttccgcttcaactttcccgtcaccgttaacttctaaatcaacttcttctttaatgctttctttttccgaagtagccgttgttccttctaccggtttgtgatggccacgtagcatttcttctgttgccgcagtcgctttttcaacattttttctgcttttgttctcttgaatgtcattaagttctttcagcacttcagttgtgtttgttgtagtgctttcgggaaccggtgatgatttggtcgaagtagtggtacttgttaagtaagagattctaggtacgatattttcttcagggatttgatcacgttgagggcgtatgtcataattgattttctcaacaacggctgcaatctgttgtttcagaatactcgaagatttaacctctgatgaaaacctttccattcgagggttaataggctttgatacgttctcgacattatcagcgctttccaaagctaaattaggaaaagacattggcgtcccttgtgttgatctcaatgttgacgaagtaaatatatctgaaacgaccaacactctttgggccttcaaaaaagccaaaagaactgaaggattggaccataattcataagcatttcgaaatgatggatcataaaatatttgacttccatactgaatacagagattagccacagctttccgatcacaggtatgctgtgatacacggattaaccaagtagggtcaacggctagtaaagtagcatgcgtggtatttgtttcaacgtcggtttccaaagagtctaaacattgtatgacaatttgatttaagaagtttttttcctcaacgggagtggccgtttttttctgtgcttcagtgagagtagcataggagttaaagtcctgcacttttgaggttgaaatgctagcgactgcagagtctcgaacagggacgaacgctgagttgggagttagccgacaaatgttttcttctttgttggcaaaccgcaaactgcggtattgtcggattagtacgggacgcgcataggtttttcgactactaagatcctctgcatctattggaagtctttcataaggaactgcattaacggttagaaattttaataaaaaagaaataaaacatcaaaaaagaaatcgatttttcaagtgacattgtagtagatttgaattttcagtcatcataatttttttatacaatcatttgctttacagaaaactgtacggttaaatctcccaaacatttttcctagggaaataaaaacccaagggctaaatgttgaaatcaaccattcaatttcgaacagaaacaacaaaaaatataattaacgaccaacgccacagtctcatccaaccactcatgccaagtcatgaatagagtaaaattttatatgtttctttgagaaaattgaattgatataaccttagagttataggcgtgcaaaatgtttgataaaagatcatcaaaattgctatcaagcatacgacgatcaattgaaaattcacaattttagaaaaagcgataaaaataaacttgattatatctaatattcattcttacctagagttaaaaggcagttgtacaaacgacctcgatcgtcatattcaaaaatgttgcgaacgaatgtatcaagttcctcggtctgtagaggatggaatgcactctgcaaaaatgaaaagaactcatcaatatccggttttttttgacacgatttcaccattactctgtgagttttgagtcatatatattaagtagatcaatgttgtcttcagttattaagaaacaaatagcgagggtattgaaaggaaatatataccaaaaaaacaaatattttaatgaattcagttaatcatgtgtcaataaattgtgaatttaatctctatattattaacaaattgattcaagtgctccgtcgactgattcactgtctgcaatactgtttggtagtttgcaagtttcaacggtagtcgattactagaacgtaaacatatactttacacaatcactacatgttaaaacacttgaaaacaaaaattccaataagctttaatttctattaaaatttacatctctattgttttgacaccaaaagcgctaaggtgaaagtatacgataaaatgtaagtacggtacaaaaaatacaaagcaattcctcccggcactttgagaaggaattcatcctgacgagagtcagaacaaaaaaagagagaggatcgtgctttattaccagacgttctgataatcattactgagacatatcagtgatgcaatccttagtgctgcaataataattaaagaatatttcaaggaactaaaggaatctttctaactttgattatataaaataattttaatattctagtgatgaaaagattattcctcgttcgttttttggtttactatttcatttatcacgaatagtgctacaactaatatgtaaacttttacgtttaatactgatgaatcatgtgagatgtcgattgaaatctttaaaagatattcttacgtataactaactctcaacttcttttatagccacggttgtaatatttctattacataggattcatctgcattaggacagttaatttcaaacaaatggatacttctgtagttttctgaaatgtcttctcgaattttttacctctcatttaaatgaattataagaagctaaagaacaatataaattttttgtgtaattggcaatactacattacagttaagccccaagaagcgagtagaggcacatagtaggggaactaaaggctccgaaggcctttacttcaatctttaggttcataaaatatataacttaaaataacatgtctttttaaatggtaatttattgaataaaacctattttcaattaacagtgggagatgggaaatttagtgtttaaacattgattaacaatgaactatacgaggtaacgcagaatatgtgttacccattcagcaaatcttaattgttcatgaatcgtggataagcaaggaatatacgatccatacatttttaaatacgaagagaatgttagagaatttcatcgatggaaggtcattttactactgagaggtaacggtagaatactgcttttgcattttccaacttgacagggttcattcgtcaaaatcgaatataaagcgaaattacaataatagcaagatagccgtggcatacaattaggtgttattttatcaattggtgaatcttaataccaaataagaataatgtgtattctgaaagagaggtgcaggaaaatgcgtataaagcaagaggaaacagcaaaaaaaaattatattaattttgaacaacatcatttcatctcaagataaatttgttccattagtcaatttttaaacatcatcagttttgatagccctacggtcggcgaatttgcaactttgcatatgacacttaaatttaatatttgggataaaagtaaatatggcttgacctcaaaagaatgcatttgaaaattaacaaaattgtatgttttcggggggttttttttttttttttttttttttttaaatgatcagtgaattttataaggtatccgatatgattttaacccagattcaaaaacaggaatattattttattacattaaatttttgaagcatcaaagtcggatatgtttatttttaaacgaaattgcttaacaaaagaaaatattaaaaaaataaagtctgatcattaacaagctatatgatgtttacaaaatctaccaaaaaaaaacacatatataaataaaagaggaagaatgaaaattacatttctcgcagtaaaaataaaacactaaaagagctagtgcgtacaaaacactccataaatataaaataaatgaacatacaacagaaaaaccatgaaattttcttacacccttgatatcctttcctacctactaaagtagattaacagtgtagaaagaaaggagcgatatataaagcaaaacgctatatttactttacgaagcacctttcaaaacgttacagtagctgtacattctgtcaggttcctttataaagtcagttgcaaattgaaatataacgtagcctgtcattaagttgcttatatgaaatagaaaaaaaaccttcactatcgatatatagttagacaacgcaagttagcaccagttggtaaatttgtagcaataaaaatgtgaatccgctacattgtttgtatgtttattatcgaaatgtattgccaattctttagttatagtagctttatctagtagcaaatggaggaatgatacctgatagaattcagcagccttttactttaaaactgctgtcccaaactcagactagagataccagctacgactttagggcttaatttgggcaaaagagcataatgtcattcataaagcatattgattgattaaataataacgtattattgtttagtgactatagtttaagaactgtgcgacgatgcatttgcagatctttctgacttgatacattatgcgtgagcgcaactgttttacacctccaaccaagtaggctaggcaagacgactgaccttgatataaagaattattgttgaaaaaaatcatcaccttgaatctttttgagtcattttatgctaaaacatgtcggctgctggtgggatagtttacgttattgtgggtggaaaccgtggcattggactttctctagtcaaagagttaagcaataaggaaggagtaactgtttttgcaagtgctcgtggacctggatctgcctctgaactgaaagattggagcaagacccattccaatgtacatatcatcaagttagatgtcacttctctacgaagtgccaaagacgctgccatgcaggttgaaaaggtagtaaaatgtattgatgttctttgggtgaattcggggatatcgaaatccttccaacctgttttgaaaacatcagacgagctttggatgtctcattatcaaaccaatgtgttaggtcctattcatgtttaccaagctttttatcacttgttaaaggagggaaagctaaagaatattgtttttacttcatcaatggctgcgtgcatgggaggagttcgtccaaacacatactcggcttacgggcaatctaaagcagccttaaattatacgatgaaagaaattagttttgagttagagaaagatggattcgttgtagtttctattcaccctggagtagttaacactgacatgtttgttaatgctatgcaaaaattagccagcaaatatcctgagatggtagaatccatcaagagcaatgccatctcaccagagcaaagtgcttcatctatgcttaaaattgtggataatttaaaaacagaggataatggaatgttttataaccttgatggcacaaaacttccattttaatggaagttcgcctgtcaatggtttacgcaacaagacacaaagcagtgccaacttgaatcaattatctataaattatgaattgaatactctggtaagatttcacttaattactttacgaaatacttaaaaaaaagcttgagaatgcacctttcaggcttatttgaattaaaaacatacgaaatagcgcagccaggtttaaattttgatatctgtgtttaatgctctcgacaaagcctcctaatcattttaaggacgctgtaagccacgctgaatgcttctctgcgagctgttcattcattatgtgagtaatagggaaacgtgatagattagtatttacaactatgcttgtaaaataatttaccacaaagttgggacttgtcatgggagacctgtggaatacaaattctattacaattcattaatagagtttaaaattttgtgaagagccgcttgaccacgtactagtatccgctgcgatctcagcggttgaacataggagcatgtgatggagaaagcacttgagtgatttactgtaatagagttgagcgcattatttttgttagcacatttcactagaatgctttatagaagattacagatctttagcaaatttgatgccatttgctgcgatctctagaaacttcttcgcacccgaaagcgcatcttaaggtttttccggcagatcttttcgggggattgctcatcgttacatcaaggtaacaaatttggccccgctgctacctggagtcttcctagatgtaaacaaaacaaatacccaagatggacagtaatgagagtgataaatcgtgcactatgcttaaacatgctcgcaaaatgcaataaacacgattaatcgttcaataacccgaaataacgatcagccgcgatttttagccattaatgcaaatttccaaacattgttgactcgaattgtggtgcattttaaatgccttcaacacttcaagaagagataatttgaagaaagaaaaggcaaaaatgagtttttgtagttccttagataatctggaataagactaggacacttgtaacactcttttaagctaaatccattcgttttgcgttcaatttttctcctgttcatcgaatttgagtgaagaatctattaaaaatcacaaaaaagttcaattcattctcttatttattgtttatttacatgagcagatttctttgtgtttatgtctgacccttcctaccgcactgtggatccatgccaacggttgctatcgacggggtaaattgccgaagctcggtaattccccttaactgtgtgactgtccgctacgttatatataatgagcggacgggccaactctcgtctctccccaactacatttcaatagtagaactaggatcaaaatggcacgtaaattctttgtcggtggtaactttaagatgaatggctctttggagtccatgaagactattattgagggtttgaacaccaccaagcttaacgttggtgatgtcgaaactgtcatcttccctcaaaacatgtacctcatcaccacccgccaacaagtcaagaaggatattggcgttggtgcccaaaacgtcttcgacaagaagaacggtgcctacactggtgagaacagtgctcaatctttgattgatgctggtattacctacactttgactggtcactccgagcgtcgtaccatcttcaaggagtctgacgagttcgttgccgacaagaccaagtttgcccttgaacaaggtcttactgtcgttgcctgcattggtgagactttggccgagcgtgaggctaacgagaccatcaacgttgttgttcgtcaattgaacgccatcgctgacaaggtccagaactggtccaagattgtcattgcttatgagcctgtctgggccattggtactggtaagactgccacccctgagcaagctcaagaggttcacgctgagatccgcaagtgggctaccaacaagcttggtgcatctgttgccgagggtctccgtgtcatctacggtggttccgttaacggtggtaactgcaaggagttcctcaagttccacgatattgacggtttcttggttggcggtgcttctctcaagcctgaattccacaacattgttaatgttcacagcctttaaaaacgtgcatagacgttttatttggcgtaaagcgaatgacttttttattcctttagctttttgtctttaatgaatagagatttttttatatcctaattttttacaagcaatatttgatttatttttatttgctatcttccttcttataccagttcgtatgatgttttcagtactttgaagcggaagtaagttaatcagaacatgtgtgtttgtcaattttaacaaactataaactgcgagtccaagaccaaaagtagttcattatatttgtttattcttttttgtgtggtgattttacccagttcatgaaatatagatacaggtctttttgtttattaatgccaggactgactaaatctcgtaggagtgctttaacgtttttaccaacttgtaccgagtacgcaatttacatgtcctcttgaatgcaaccattatagttaaaaaacatttaactgtttatacttgctgatttctcttcctatttttttattcagcattaataaggactacaaagttcctattttttaaaatatatgaccggtttgcttaattaataaggcaaactgccaatactcataaaaataccattaggtgctgctgggacgtacatcatcaaaaaaacaactattgtgaaaaaaagaatttacttctttgagttgctggtcttggaatagtgtcgctaaagtaaattccagttgggcgtccattgctcaagtacttcatgttctacaaagcttgtccaagtacattgacgtgttcgaaatggattcattcaatcattaaaactaagaaatttctatattgtcgacattattcttctaaatcatttatagataatgccccactgaggattaacccggtcggtgttcaatacttatcacctgctctgcaaaatcaagtatttccacagcaaaatacacagatttctcaattgcaccttgatctggcaaaattccatttggcgaagcaccaactactgaataaagaaacgataaagcttccatcctttaactttagacttcctcctttgcaaggaaaaacgatttctgaacatttttacaatataggtttagaatttgcagagcctcatctctcaaaggcaataaaatttagcaaaatcgatactccggttcagccaaaaacgtggaagcgccaacctggttggaccaaatacgcgaaagatggaagtatttcttgtgttccatacccggatagtgattgtatggtatttgatgtggaagttttatacaaggtgtctccttttgctgtcgtggctaccgctgtgtctgaagacgcatggtattgctggctatctccttggctactgggaaagtccgaaaatgatcgtcaattaatcccatctaacccaaagggagctttgttcgtaggacataacgttagctttgatcgtcagaggattcgtgaggagtacaatatcaaatcttctcgtaatgtattccttgatacaatgtcattgcatgttgctacacatggaatgtgctctcgacagaaacctacttggttcaaagcgagaaaggcgtatattcgttcacaatctactgaaacctcggaagacgacgactcttcctcgtttgatgacgattatcaaaattacttaaaacaagaaccatggttagctcattcttcagttaattctttaaaagacgtcgcaaagttccattgcaacattacacttgataaatcgaaaagagacgattttgcatctttggaaaaggaaccaattctacagaagttgaatgaacttatcacatattgtgcgcatgatacatactctacacatcaagttttcaaaaaagtattccctcagtttttggaagtctgtcctcacccagctacttttagtgctatgctatctctgggtagcgtatttcttccagttaaccattcatggacccgttatattaacggcgtagaagaacagtatcaacaaatgattcaattagttgatcaaaaactgtcacagtatgctgaaaaggccaaggatttaatcaatactaaggataccgtcctgaaagacccatggctccgtcaacttgattggacaccatgtaatctttataggaagttaaaaaaagcaacacaagaggtcccagtggttcccaaatggtacaaaaaggcttattgtaaaaccgaaaaaagagctgtgattactgcaaaatctcgtcttgctcccatacttttacgtttgaaatggaagaaacatcctttagcttggtctgatacctatggttgggttttctctgtcgaaaggacatctaaagatgaaatcgaaatgcttcttgatcaagggcttgtaccttgcagtagagaagaagatacaaaattggactacaataactacattttttttaaagtcccgcacaaagatgggcctgaagctagatgtggttcgccactctccaaatcatatcagcgatacttcgaagagggtattttacaatcagattatgaagtggctaaaaaggctctagaaatgagtgcatcatgttcttactggagtagtgctcgtgatcgaattcgatcgcaaatggtagtttgggacaaagatgctgaacttggagttccgtcctctgtcgatggttttggtattatattaccttgtattattccaatgggtactgttactcgccgtgctgttgaaaatacatggctcactgcttctaactctaaaaagaataggctaggatcggaattgaaagcaatgattcgcgctcccgatggttacacctttgttggagcagatgtagattctgaagagttatggatagtagcattaatgggtgattctcagtttaggctacacggggctactgcattaggtatgatgactctggaaggaaaaaaatccgagggcactgatttacattctaagacggctgccatcttaggcgtaagtcgtgattctgcaaaggtgtttaattacggccgactatatggcgctggattaaaacacactactttgctattaatgcagatgaatcctactttaaagactgccgaggccaaagaacttgctaaaaaactatatgcatcgactaagggtgtcaaatcaaaaatgagcaaacgtttgcaggaaatgggattaccaaagctaacattttggtcgcaaggtacagagagttttgttttcaacaaacttgaggctatggcacaattaccatcccctagaactcctgttttagacgctgggataacgcaagctttgagcagtaaaaatctgagcaaaaactctttcatgacatctagagttaattgggcaattcaatcatcagctgtggactatcttcatcttctcttggtatccatgaatcatttaattaagaaatattatctagaagctcgcctttctttaactgttcatgacgaggttcgttatttatcatcagataaagataaatatcgggttgcatttgccttacaggtggctaacttgtggactcgtgcgtttttttgtcaacgacttggcatcaacgagcttccacaatctgtcgcatttttttcttccgttgatattgaccatgtactaagaaaagatgttaagatggactgtgtaacaccctctaacaaagtccccatacctcctggagaagagcttactatagagtcagttctagaaaaactcgagcagtccggtcaatcacttgagccacttgagcaaattcagtgttttgtggatgttaaagctactacttcagcagagattacagaagaagacaaaaaaaacattgcatatttaaaagcacaagcattttactgatcagcaaaagaataatttattttagttaaaaaatgtgtttttcggttaggataattttagggatagttatgacattgaaaataattttcatcaaaaggtttgtttagtggagcgaacgatggtactacaaactggctcatgacgaaggaaaaaaatcattaaattagagcaagaaagacacttttgtaactagctgtgtcgattttcggacattatcggaaatattattagacaaaaaaaaaacaacgagatagtcaaaacatatagaaacagaacggatcaacacgtatgtacacgaagggtaaggggagtcttatgaaaggaaatcacaagaaggtagctagaaaagtagctgaggaatcgtattatgcaccaaatattttgatggaaaagccatttttaacaagcagtaaaagtaccattggccttgtcaatagaagtcttaagtgcagcaacccagagtataagtgaatcttcgttatcaacgcgaaattcgataggtttgttttgcgtaattacggtaaaaaagtatttgtgtgagctttccggaacgtttatttcagcaacatcctgaatgtcggctatcggtatcactttaacaggtttgtactctcggttcgtgttgtaaatagtcataccatatccacgaacaacagcccaacacttggaccacctatgtaaatttccatgtagccagtgaatggttccttgcataagaactttattttcatccaagagtttatagagattttgtaaggaagccgaatgcctgtgcttattcagcgtattaacttcttgtgggttgaaggggtaatttgcattttcttcattgatacctggtggtctcaactttccaaactgtatcaaatcataaagtgaagtacagaaatggtcaccctgaccagtttccaagtctaaaggagaagtcgtttgattacgaggttcagtcgaaatattgtcgaagtcagtatcagagatctgaacgttaggctcgctttcggttcgagatgaagagttcgcaaggatataactgataggatgtcttgaaaacggtgccctataacccgttgtggatcttagaacatgaacccattcctcagcatcctcatttgaagtggcaatgagacgaattatcttttcatttaaatacaggaaaaaagctaaacattagatataaacatcaaaaattctaacgtactttttggtgatttttctttgtagtaggcaacagctgaaatatcctgagtagggaaaataaatttggttttgtactccttgaagactgttagcgcgtcgttgaaatttgcacattttattcacaaaccttttcgtctttgtaaaaagataactgatctctgcgaagaacagcccataattgctttttagtctaggttgttagcatccactacaaaaaaaaccatgagtgcaaatattgactctgaaacgggaagcaaataattggaatattctgaaaatcaattggtcaaagtgcttgtagggtgctgtttgcatcatcatatccccaaatcaaaagcgaacaataaagaattaagagtacgtatcattcacttctaagtacacttcacaaaattaaagaatactccaaatccctttccactcaaacgtatcgtaaatattactcagacaactaagttaatgaatacatacagaagttgcatgtcctttctttatcaaccatccggattttaaaacacgctcaagctctggaagccttcttgcttcatcaaggctagcagttctgagatgcgatgaaactcctgggtccatttcatcaagcgaatagtcaaactaataaacgccttctttcttttgaatacatcaagaaaattccttaaactgaaaggtgttaaactagaacgatgtaaagtcgtcctctatacagattttggttaaaatcacgtttcctaacgcatacgtgttagtggtaccagcgacgtacatattcagtaatagcgttcattaacgtatcgctatttgtcaagtgaaattaaaatgtatggtagagaaatttcaataatagaaatgatagtacgaataaattgtagcagtagaattgagaagccttctttttgaaaaaggtagtctgaaaatatgtcatctttattttgagaggcatacaaccatatagtacatggacacagtaatcgtgtagaagtgctacatctcgtatactaattaagaatcaaaagaacttttgtaaatcctactgttacagaaattcaactttaggttgtattggtgcacagtggtaagggattgttgtaaggactggcaggatgaaaacaaaaaagctatttaaagggagcacttgttcgctgtaacaaaaagaaaagcaacaagaaagaaatacttttttaaatattttttagagaaccactttctctaatgtagaaagcgttggtctttcccattcggttcgagacctatgaaagctactcagtagatactgagttagtagggagtagggtttaaacgtgattttagcatggtttcttggaataataataaaaattcccttccgtcctctatgccatcttctttatgcttcactttacgtccagatagttgatagtttccggtcttgtaagatgattattgatatggtaaatcaatcacaatcgaatgaaagataaaagaataagagtatgtaaccctttaagatgggaaatatatcaagcaagaatggggttaaaaaaaaaacaattttaaagtcattaaatcctttttaataccattaaatagtactaattttgctcgtgagtaactaaggtcgggtagcatagttggttattgcgcacgactgttaatcgtgaggtcgagggttcgagtccctccctgaccggattttttatgcttcaaatcaactgcagcaaaaacatacgctcaatcaatttaatagaaatttgcaaacacccaagaacatgtttaactcagtcagtttactgcgaagctcacatccaaaaagcaggtttgatggcgttttcctttctacttcatatgttagcttagcaaccaaaaatgctttattgagcccgttatgctgtgaatttccaagctttcgaataaaattgttgcattcgtgttaaacaataaaaaatattttccctactattactgaaataaaatgccttgagtatcggaaatcttttcaaaattcaggatacaaaaaagatgccaaatttttttatattaaatcaaaaaaagtaaaagacgttgaagtctttattgtaatacctctattaaatgatggtataaactgaggaaacctatcaaatatacagaacaaaaaaaattatatccatagtaatagtggtcaaaaattaggtatacaaacaagattaatggtggaacaaacgcaaggggatctcggaaaagaccatgttgaactcattagcagtgtcgcgaacagcttgatccatgacactaccgccaggtgcagcaacatatttgacaccgctttgggcaagacgatagatgttgtcagggaaggggaagaaggcatcactggcacagacaacatccttgcaagtagccaaaaattcctcccgctcctttttagtaagaggctcgggaatagtctcgaatgcagactcccattgctcacgttcactaccttcagcaggaacggcatcaaggacgtacaagtcaatagcgttagatttctcaggacgcttagcagacttcttaaattgcatacccaagactttagggtgatgacgaagccaccagttatcagccttatcaccggccaaacggttgcaatgaatgcgggattgttgaccagcaccaagtccaacaaccataccattcttagcatagcaaacagagttactttgagtatacttaagagcagtggtagcaataaccaaatcaataagagcagatttgggtaaatccttgttcttactaacaactttctcaaaaaggctgaagtcaatcttggcatggttgcgatgctgttgtaagctaataccgtagacctggcgagtctcaatttcggcgggaacatacttggggtccatttgcaatacacagtatttaccacccttcttcttcttcaacaactccaaggcttcgggctcgtaaccgggtgcaataacaccatcggaaacctcacgagagataatacgagcagtgcaaacatcaactgtatcggagagagcaataaagtcaccaaaggaagacatacggtcagctccacgggctctagcataagcacaagccaaaggagtgaactcggtaatgtcgctaacaaagtataccttcttttcaacatcagacaagggtagaccaacagcagcgccggcaggagaaacatgcttaaaggaagcagcggcaggaataccgatgttttcacgaagctctttgaccaaaggccaagagttcaaagcgtccataagattgatgtagccaggggaaccacataaaactttgaaaggaaggggtccttgttccataaaggcttgggcaggagattgatggggattagcaccataacggagagtcaattgatcaacgccagcagcatattgcttgcggaagtaatcagtgatggcagcatcgtaagaagcagtagaagcaaaggccttcaaagcataagtatttctgtcatcttgagtaagtttgtctgacaaaaacttatcagtgaaagtcgcataatcagcgggatcgctcaaaatggttacacgagcgtggttctttgcagcggcacgcaacaaagtaactccaccaatatcaatttcctcaacagcttcaggaatggtaacgttaggcttggcaatagtttcacggaagggataaagattgcaaaccacgatatcgatcttctcgatgctttgttcaacgagatccttttcatcggaaggaatatcacgagcaagaatgcctccatggacagcaggatgcaaggtctttacacgaccacccaagatctcaggagcattggtgatcgaagatacatcagcgacttccattccactctcacggatcatcttggcagtaccaccactgcccaaaagcttaacgcctttgcttgttaacgctttggcaagttctaacaagccagttttatcgtagacacttaacaaagcatacatttttatccaagaatcccgtttgcgaccaaactaaaagttttagatgttagttcagctgaaaattgctgcaccccaaagtacgactttaagtgtaagaacttattattcaaaaacacgctattgattgataacgaaaaccaacaaatttataaggtttgctaacagtctctcattatgtctgaatttgtgataacagaagagtctgttacatgtaatagggtaattttcttcaatacgttagactacgctactagttttgttcatgtcgatgttttgacttcatatggaaaaattcaagtattgttcgaagcaatagtgactgcaaatggagtttgaatgtgacaacggttaaatccacatgccagtctgttttgagtgttgctcttttagacctaacaggcaatgatcaatcgtgcatgtagtcaatcaccaaattcacttacagtcattgtctgagcattttctactaatatcctaatgtgttaatcatatacaaagatgataatgaaaccggccatcggctattgattcttggttctcagaaatctacagctcaatcatgcaatactgatattacagaaaaaaatactttcatcgtatgagctaactcacgtaaaatcattcaatttttagatacgacaacctctttgcttgtttatttttgaaatactaaattgcttgcttcagtctttataaataaaagtataatcattagatttcatgattagcatagaatataaaagaaaaacatcactagcaaggaacatttttcaaattaaaattcaaaaacaaatcgttacaaaaagatgcaatttataaaaaaaaaatgaaagtacacacacacggttaaagagtcaaaaagaagaatttaattttattttgctcaagcttataagaatctgtaaaaaaaagttagtaaattattcaaataataagatttcatggaaaagcacttgaaacaatagaaatattcagagatcggatttggcttccgggtcaatcgtcacagatttcggataggggcgacacaaattgctcatcatagtaatatttttaacattgtttcagcgttttaaaactcaagttgaaattacttacattctgttttgtaattgacaaaccacctcttgttatgagcttctacttatataatccttggacagtcacaaccctgccctagtatactgttaaagaatgtcaaatagtcattaaaaattattgaaatttcgatcatttaggttattgaagtattatgtagcaagtaataatatagtatcttgaaaatacttaagagagctgtaggtcatattaccgtacaaattgattttatttcaaaatcccaaaaattcggcacttaacatgtaaaattactccttttgcaaatttactagatttcttgttttatttagcattcataatatattgccatggagttaaaaggatagttgcaaagagctctcttatttacggagccagcttgaggataggtacggattttgtaaatgagtagttaaacagtaagtcaatgcgaaagtgtaatgatgttagcgataaatgttaatttagttattttaaacctatattattcagcccaattattaagttattttggatttggaatgcgctcataacatgcaacaaatttctttccgccattacgtgcaacctttttcccttcctctgtttcgtttgtcatcaatgtaacacatatatcgttttcttcttcttcttttgtgaatcgtcgaaacaagggatgcgcgtcgagatgttgagccatccaaacatgtagctcttccacgtctgtaatggtataaagcgttccatggggtcgaatgaaataagcatactcacttgccaaagtacttgtgataattctatttttatgtttacgagccttgaagtgaggatctggaaagcagaaaaacatttttgagagttgccctttttcgaagaaatttggaaggaacttttggcaattcatacgaagaacagaaatgtttttgtatccccctggaaccggctcttcatgatctgcacgataacgcaatgcttgtatcttttctttcaaatagtctgaaacttgcatccggatttccatgcctaaaactaatgtatcaggaaactggggaccaagtgcaacagtaagacccccgtagccgcatcctatgtctacgatctcgacctttttgttagattcaacatcaaaatcaggataataaggactccaatccatttcagacggacttcttggactgcgagagttagcaacaaccaaatttttaaaaataaaatagaaggtaatcccaaattatataaaaaatatatgtaaaaagagtttatcggtcacagttctcagccaaacacaactactgtatataaacttactactcaagttcatgatccgaaaggacatttgcatgcgctctttgacgaaacaaacgtttctgtaaacaatattagttaaaagtcaatacacaagataattttgtatgagaacataccatgggcaatcgcccctccacacctccttgcttggacaaacgtttcagcttcttccttgcctcctcttcttccctttgcaattgtgctgcagattttttggctgtagcagacattttctctctttagttgagcacacgaaaaccccaaaaggtaaaggtttagtaaactagctgtgctgtagtaaaaatttgactgagaccaaaaaatttgtattcaaatcagctcagtgtaaaatttatctaagcgagaaaactaaaagagatatttgaatgacttagtaaaatttatactttaaacatttcataaaaagtaattaaacttgttcagtgcgcaagttcacgcttcgctttttaattattcaaattgggtttgaaaaagggaaatgttatgttacctaataatttagaagtacattgtaaatatatataaaaatttgctcatattctatctaaatatgcaaaacaaattgaggtagaagaaagacatgcattcaaatgcgtccaattcaccagtaagcatttcgttgttacatgcacactaaactaacctcaaacaatacaggtacaataacgcaaatctagtcattacttgagagcaccagcactcttagcggcgcctagaataagttcggtgatctcatccatcccaacttgatttttgacttgtgcaaaaacaatgggtccattctcacgaatcttttttgcatcacgatccatgaccgacaaatcagcaccgaccaacttagctagatctgttttgttgataatcaacagatctgactccgtgataccaggtccacccttacgtggaatcttgtcgcctccagatacatcaattacatagataatgaaatcagcgagatcacgagagtaatttgcagctaagttatcacctcctgactccacgagtagtaattctgtgttgaactcggattgcaactcctccaatgcgaccaaattaccggagacgtcttcacgaatagcagcgtgtggacaaccgcctgtttcgattgcgcgaattctctcttcgggaagtgccttgttacgaattaaaaattcttgatcttcacgagtaaatatgtcgttggtaacaactccgatgctatatttttcacccaagagcctgcaaagctgaagcaaaagtgcagttttaccagaaccgaccggtcctccgacgccaatggtaaaggcacgacgagagaagtctctatgattgaactgaggaagttcacgcttcaagtagctgccaggcgtttccatagcatcgtgagaatggccatgctcttggatgaactgcaatctggcagcttcgctggaagagttggaagatgaatcatggctgtgatgatcgtgaccatgatgatcatggttatgatggtcgtaatcgtgtgtatggtgatgagtcgagtcatcagaacctcccttgtgaagaaaaggaatcgccatgttttgaattagaagaatgtgaaataaatctacgcaagttttaaaaattttgaaaatcctagtttggcagatgtggaaagttagaggaaaccaaaaagtaaagttataccaagcttccaaattacctgatttgtaagattttataagtgtaaatacaaatgaaggtaaagggataagaaaaatatttaattaatcacgagaaattgtaaaactgattatattcgacgtgaaataaaccaaggaggaaatgggagtgttattggtgaggcagatttgctatttactattgtagataaaaggtgcgctacactaatatcgaaatttcggtcgttagcattatccacaattgagttacttaagaaattgaaatccaagcaaactgtaaggcacttgacattttcaagaaggttggggaaggtcatttatttgataagagaacaagcgccattgaaactgtttacaatttataacgcctaaatagttttacaaacgaaaaaaaaaaaacttgttgaaagagtatacagaagttgattactgaattcagtaaaactaattcctacagaactgatttactgcaagttttccataaagggatattgttacaataaatcgctatacggagctgattgaaggatattattaaatctttttattataggaatacccgtaagatgatatttactaaatattaaatccttaatgaggatatcggttttaaggagttatagtgggttttcgattaaatgtagtcaaatagtaaattttcgaaatggaatggcaaaaccagttatatttctattataaaaataaagtttggtaatggtatagttgtcgtttgaagcattataattaagctgctttgtttgctacgttgtcctttcctcctattgttattactgactagatggatgaaacgaacgagtgaaacataatgtgcctcaccgccatacagtactgttaagatacctataattgttaaacatcagtatccatctttaccgttaaaaaaagatgcgtaaaatagctttcgaatgtcagcaatactatactacgttgcgtatcactatatgtcacatgttcaacatcagatcataggtattcattgataacaactatttagaaagattataaatagagctacaactgaacctcgttcctcaattcagttatgagctatatcggtgaccgatactaacagacttcttataacaataaatataatattgttagttaacataccgcataccgctacattgtagatcgcaagcaaaactcaccgttgctctatgtatcgttaaacagataccaagctgcgtagatgacattcttcaattgtaagatgctacagtaaatagttttaaagaggtctagtgtaaatgcaattatatcataaaaaaaaactagatttatcacatcgggttcaatacattgatattactactgcaatagtttatctttgtaactgaattatactccctacacccgtcaacctcgacggtatcgtctcataacgtcgattttcccacttcgtcatttatgatatcaacgctgggcatcgtagtgtgatataccgcatttataaagtaaaacgtagaacgattattgagttgtacatcatatgttgacgtcatttacggtatgttgaaatagtatatagcagcaagtgaaaccgcagaagttgatttcattctccatacattcattctcaaatacgaattgtaattgtaaaaagacaattaaatattcgcatttttacaagattcagcatttcctatattaatttggaataaatctttttttgaccacatttttttccagttgtcatactcgtttctctaaataaactatcaatatgtctgctccttacaaaaacttggatcgcgatactaagcacactcatcccaaattgaatgagaccgaacgaaacttgaatcgtggttggggcgatgtgaagaaggaggagttgtatgaggatttggctcagagtgatgctgacaagcaacttgctgaggataagatggaaacaaaatacgagaaaagcaagcctgccccctccgactagaagaagtgcattcaattaacaaactaagtataatcaacaattactaaaattctacgcttaattcgtgatgcctttttttgatcgatgatttcatgcctcatgacttttagataccaaaaaaaatgttaatgactaatgaaagaacaccttaaatcttatatgaaaatgaatttttgcccaaacgtaatattaaaactatactaagtggatgtcgcacacgtatgtgtatttaatagtatcgccagtgtaaactctgaccagcacgacagattagtaagtttacagcttgtcaatccatgaatttaagcaaactgaagggatatatatatgtatatgtacaatatgtatatgtgttcccatcaaaatctgtattgtaggcttaaaactgtcggcacaaatgtaacaaatggtctataaaatttacacaattttttcaactataatctagcataaatggatttaaatgtataatatttttctttattaattaatattttatcctcattaaacagaaaacacacacatacacactatgtatgtatccttttataatcatcaaatatcattagggtaaattcaccatatacattatacacccaagatgtcttcgtctccggtctgcttttgtactcctgcgacaacaggaaaagacaaatcaatacgaaatcaagcactggaaaagataaacacatgaatgattcagaattcaactcgagaggcaagatgcacatggtgctcataaagtttaaaaaaaatagcatgacgataaattagcacataaagacaagggaaaaagaagaaacagaaacaataaagcgaacgggtttaatgaactttgcggaagtattttctccaagcttcagcaattgggttaggtacagtttgctctcttaacgtttcaaactcatcggcagattgactaccaacggatttttgcagagcttctgtatcagtcgtattaccaccattgccgtaatatgttcgactattaaaaaactggttatcatgctctaagcttctcctaccttgagggccatgtgagcgagagcgatattgttcgcaaaattcatctgccgaggctcttgagccgtgtcgttgcagagtgcaattgcgccaacgacgaggaggagaagttgaaagctgtccttctgaggattgattttgtccctcgaaatgtacgttagcaggctctgatgaagcttgcatcgtgaagacaagaacggaagttgtgaaaaataaaaaaataaactaaaaaaagatgttttgatcgatccactaagcgtttgctattagttggtatcgaatgaaatcaataagatgtaaaggaggactagaggatacactgagcctattgggaggaatcagcgttcacggaatacaacggaagagtaagagtgattcgacaaaaatctgaagctaagcaaaaatctggttagcatgaaaacaatgggaacaacaacaaaaaaaacaaaatttagacagcttaacaaacaattctcaaccactaacttaattaaacaaactgattaatcaactaactaggcagcttgttcgtttttgcttcctacggtttgtcaaccatccatccacacttaccaaagccgaatcaagagatcaacgagttgcttttgtaaaacaacaagcaattgtatttccttttttttttgtaaaaaagctaggcggcgcaaaaacaatcgttcttaatgttaagtttccgcaagccagatagataatgtaacaaaaaaaaacaatatatatatcttttatatttatatatatttatatacaaacacagaaagtaatagatatagatcgatagtgtatacgatatgcgacgcagcaacaatcgaatatcagagtatcgctttcttttataggatcaaataagtgtatcaaacagacactgaagtgaaataaatattacacttgttaagggtgagtggtttgatcgtactaagtcaaatcgattctaaagtatacgatggtgaattgaagatggatggaacaagccttcctaagttccagcatatctttttataacctttacgtaactacgacatgagaaaaattaatttgcctcattgctaggatacctttttctttgactcatcatcgatcgccactgccaccatattaaccttgacttgctacagtgaaggattacgaagaacgaagaattgtaattgtcgcatgacgaaagcacttccttctttttgcgaatgtaatgtctgcttcatactgaagtctatggaattggtaatcccctttcctcttaacccttcgtagcaaagtgaagtgctgtgttgcaatgaagcttgttggaactgcaatgcaaagcaattaaatgcgttagcattctatcgcaaacactattcaatcatcgaagtgttcagagaagaaaggaaggagacttgactgatatacttttacgattgacacacttttgcaatcgactgaagaaatttccttatgagcaagcgcacctgtaaaaagtaagtacctaagcaacaagtcgtccttctcaatcatagaatcacagcttcgggccctttcgacttgttttatgaagatttttcttctttttcatgtgaaagtaaattttcatacactcgtcagtctttctctagttgttgtaccttgttctttttttttttttttttttttgaatttgtacatctaccctcatctccaccctttgcaacatgtcatgcaagtacaacgattaagggatactaaaacactttccagtaactaacaaacacattttcatactcatatattatccattaattgctgttacgtatgggcggcacaatatcacttacatctcatgaattagcgacatgaatgtggagaagcttggggaaaaagaatgcgacaaaccttcctacaacgtagccgtttattttcataggaatagatagaaatagaatttattgaaacattcttcatttgaaaatgggttttcaacagacttggtattctacctttacaaacttattatattttcttctttattgctccatttgttatattcaccagccccaatttgatgtaacgcatttcgcagttcctttctgcaccctactgttctttacggtacatcactcttattgttagctacgcagttcggtatctgtttaccgatacatattgacccgcggtgagtttctcttgcgatctacaatataacggtaaagcggtatgcggtatgttcactagtatcttagtatatgacatatagtgatacgcggcgtagtaaattatatagtgtagtgctatattgctgacgcacaattcgctttactgaatttgtctaagctgcacaatttttttactgttcccgctacgccgccttacctttgtagtacatgtgactagacaaactcgctcttttatcacatctcactcttttacactatgcgttttatcgtattccttcattatacactatgcatgctgtactttttaatgctacactaaaaatacgcacacttattgctttgaattcatttacattaacttgtcactcattcactatttttacattagcaccttttttctacttatgctgttattctgaaaacaacaatagaatatctttaaatgataatttgttattataagataactagtttaattccatttattctaaaaacattaacacctcatgatcgtttgtttaaattagagtaacaatatatacaaacaaagagacaaacgtcaaataggcaattggcttattagctccagcggaggatgggtataagccagtaacgttggtgttgttaccgcctgtgaaaccacccgtcgtgtagtaggtatagttataggtagctgaaccgttccattgacgaacggtagaccaagtagatgtaccagatccttgataaataggattgctagtaacagtactgctttcaggtgcttcggtagaagaaacagtttcggtagcaggagctgaagtgtaaacactagtagtataataactagtggtaacaacagtgctaggctcgtactgggtagaggaagtagtgtaagtaaaagcactagattctccggatactccagtagtcgtagtaacatgagtgacaggatacacggttgagccaggaacgacagtgctaaccacagtagaagatacaatagtagtgtaatatccacttgaagaagtctcagtaacagcagtagtaggttgaacctcagtagcagtagtgacttgagtctcagtaccagcagttccagtagcaccagtagtagtttgaacctcagtggcagtagtagcttgagtctcagtagcagtagtagcttgggtttcagtaccagtagtgacttgagtctcagtaccagcagtgccagtagcaccagtagtaggttgaacctcggtagcagtagtgacttgagtctcagtaccagcagttccagtagcaccagtagtaggttgaacctcagtagcagtagtagcttgagtctcggtaccagcagttccagtagcaccagtagtagtttgaacctcagtggcagtagtagcttgagtctcagtagcagtagtagcttgggtttcagtaccagtagtgacttgagtctcagtaccagcagtgccagtagcaccagtagtaggttgaacctcggtagcagtagtgacttgagtctcagtaccagcagttccagtagcaccagtagtaggttgaacctcagtagcagtagtagcttgagtctcggtaccagcagttccagtagcaccagtagtagtttgaacctcagtggcagtagtagcttgagtctcagtagcagtagtagcttgggtttcagtaccagtagtgacttgagtctcagtaccagcagtgccagtagcaccagtagtaggttgaacctcggtagcagtagtgagttgagtctcagtaccagcagttccagtagcaccagtagtgggaaggacctcagaaccagtagttgtaggagtattaatgacaaccgtagtggttccagtagcagttccagtaggagtaactgtgacagtagatgtctcggttccagtgtaaccagttgtaacagtaacaatgtcggtttcagtcgcagtcactgtggtaggtgtttgaataacaactgtagtggttccagtggaggttccagtaggagtaactgtgacagtagatgtctcggttccagtgtaaccagttgtaacagtaacaatgtcggtttcagtcgcagtcactgtggtaggtgtttgaataacaactgtagtggttccagtggaggttccagtaggagtaactgtgacagtagatgtctcggttccagtgtaaccagttgtaacagtaacaatgtcggtttcagtcgcagtcactgtggtaggtgtttgaataacaactgtagtggttccagtggaggttccagtaggagtaactgtgacagtagatgtctcggttccagtgtaaccagttgtaacagtaacaatgtcggtttcagtcgcagtcactgtggtaggtgtttgaataacaactgtagtggttccagtggaggttccagtaggagtaactgtgacagtagatgtctcggttccagtgtaaccagttgtaacagtaacaatgtcggtttcagtcgcagtcactgtggtaggtgtttgaataacaactgtagtggttccagtggaggttccagtaggagtaactgtgacagtagatgtctcagttccagtgtaaccagttgtaacagtaacaatgtcggtttcagttgcagtcactgtggtaggcgtttgaataacaactgtagtggttccggtagaggttccagtaggagtaactgtgacagtagatgtctcagttccagtgtaaccagttgtaacagtaacaatgtcggtttcagttgcagtcactgtggtaggcgtttgaataacaactgtagtggttccagtggttccagtaggaataactgtaacagtagaagtctcagtaccagtataaccagttgtcacagtagtaacggtgccagtaacaatggttgtaggaatgatatacgaagagtttccataaggaatctcaactgtgttggtaacaacagggccagaggaaccggtcaatgtagttgtaagagatccggaatatccaatggtagtagtggtagtagtagccgaaacactgggagtttcgatataaactgtagtgggaccagtctcacttccactgtgagtaacaatagaagtaagcgtggttgatccagtccagccagtcgtaatagtagtataaccataattaacactagtagtggtagggacatcaacagtttcagtaacaatgctattgctaccgctaccagtcaaagtagtagttaccgaaccagaatatccaacagtagtggtggtagtgacagttgtgggataaggagtctccacataaactgtagtaggtccagtctcattaccactgtgaggaacagtagtggtaagagtagtggatccagtataaccagtggtaacagtggtgtaaccatagttagtagtagtgggaacctcaacagtatcaataacagtaccattgctaggagctccagtcaaagtagtagtgacggatccaggatatccaacagtagtggtggtagtgacagttgtgggataaggagtctccacataaactgtagtaggtccagtctcattaccactgtgaggaacagtagtggtaagagtagtggatccagtataaccagtggtaatagtggtgtaaccatagttagtagtagtgggaacctcaacagtatcaataacagtaccattgctaggagctccagtcaaagtagtagtgacggatccaggatatccaacagtagtggtggtagtgacagttgtgggataaggagtctccacataaactgtagtaggtccagtctcattaccactgtgaggaacagtagtggtaagagtagtggatccagtataaccagtggtaatagtggtgtaaccatagttagtagtagtgggaatctcaacagtatcaataacagtaccattgctaggagctccagtcaaagtagtagtgacggatccaggatatccaacagtagtggtggtagtgacagttgtgggataaggagtctccacataaactgtagtaggtccagtctcattaccactgtgaggaacagtagtggtaagagtagtggatccagtataaccagtggtaacagtggtgtaaccatagttagtagtagtgggaacctcaacagtatcaataacagtaccattgctaggagctccagtcaaagtagtagtgacggatccaggatatccaacagtagtggtggtagtgacagttgtgggataaggagtctccacataaactgtagtaggtccagtctcattaccactgtgaggaacagtagtggtaagagtagtggatccagtataaccagtggtaacagtggtgtaaccatagttagtagtagtgggaacctcaacagtatcaataacagtaccattgctaggagctccagtcaaagtagtagtgacggatccaggatatccaacagtagtggtggtagtgacagttgtgggataaggagtctccacataaactgtagtaggtccagtctcattaccactgtgaggaacagtagtggtaagagtagtggatccagtataaccagtggtaatagtggtgtaaccatagttagtagtagtgggaacctcaacagtatcaataacagtaccattgctaggagttccagtcaaggtagtagtgacggatccaggatatccaacagtagttgttgtggttgtggtagggactgtaacaataagaattgttgttggagggggacaactagtacttgttgaaccagatgtggttacaattaaaaccgttgctgggttgcatgaggtgctagtcgtatcagctacaaaagttgagctcgcttcaacagcatttgaaacttgtgaacctgaagtggtagtcgaatcaggaagaaaggtagatgggcttgcttgaattgcataagaagcttctttccctgaggtaaaagtgctaatagcagtcatggaagcgtcgttgctaacgggactagcagtaatgtagttagcatcatttccattttttactgtgaaggtgctagtaaacatgctaggatcaacagcagcgtctctgccaagtaaggttggcatatcgtcaactaggaaatttggatccgcaagctcggtctttggaagtgaaatatcgtgaggcacttcattttgtgatgcagaggaaaggtaatcttcaggttccattcccttttgcaaaatcctgacatttccagaaggtagaccagaagtcaaggagggaagaagagcagccgtgaaaagtaatgcccgagcagatgtggataaaaaccttctaacagacattgttgatatattcaaaaacgggtaagtgaattagaaaaaaacaaaattattaagataatttaaccaaacgaataaaaaaattaaatattatcaaaaacaaaattaaatccaatgcttgacgattggtgtgcagagcgcgtttattgataatatgatagaaattcaattagaaaaatagtgaatcccaaatgaataaagctcgtagtttcaacagagaatgaagaaaagagggtttaaatgaatgcaaaattgcgaaaagattaatgaaagaaataatatatataaataaaaaataactggatgaaaggagattcgcaagctgtattaccaaaccaacccaaacacgaaattacccagtgtttattttgtgtaaatgtaggacaacttaaaacccaatttcaacccgaaatcctagacgatagaatgggggatgtaaagaaaaaaggggagaatattaaaaaataaatgctagccagatttattttaaattattcaaatgaatgtaaaatacccacttgtaattcaaaagaatgtagaatatgtacaagagcagatttgtttctcaaaaaaaaaacaaaattggatgctggcgaaaagaatgagtgaagatattgttatcacagattcgtgcagcgaagagagatcaagtcgctttcccaaaataaagatggaaggaaggaaacaaatgatgatacaacaaaaaaaagaaagttccaataaccaaactctagcaacctcaacaaaaagagagagacagatggtgtatatggaataggtaatcctttttttttgcaatgttcgaatctttctcgatgctttgcttttatagaagaaagtcaacgatcttaatctcgttaagaatgttttggatgttcaattgatgactgattgacgaacactcgaccactcgccttcaatgtaggagcgaaataactttcttaagtagatgcggccatatttataaataactacacccaaaccaatctgtgtgaaattttagcaatgaatatttacggaatttttcctttgcgactttttctatacccctctctctgtaccccgatgacccttttctcaaatgttccccgtttttgcaagtttttctttttttagagaaacattttgaattcgaatttaaaaaatcgttgtcacctatgtggaagaccccgcgataacataaaacctcttcgcaaattctaatttcggctagggaataatctctatctcgggaacatggaggtaaggatccacttttgcattctgtgctggttcctaagaatatcgaggtcgagcgaagaagaaaatttcgatatatggaataacgagaccgagtatgctaaagaaagagaagaaaagaaggctgattacaggagtagtgtagaggatgtagcaagcgcaattttaattgcaattaagaagctagtgaaacaagagattaagatttaatttgtggagatgacaggagagaaatgaaaaagtgcgactatgaagaatgatgagtaagtgagtggaagtgtagtagagatggggttgtggtagcgagaaaggcggtgtttagaaggatgtagtagtagttcatgcaatgtcaattcattagttatgcaacgtctaagtcgttagattttcaatgtttgcttagtgatcaaagcatttataattgaaattttttagttcaattttaaggtggcagcgttcagttgctattttttcgcgtctatttgaattgcgacgattgtaaacgaaaaataacctttcaatattatggatggatgtccattcgcgcattggaaagtttctactgatttgaatgactttttacgcgtccttttccaatttcttttcctacaatttttggcaattgtttttgttttttttgttatcaccactattgtttcatcttctccctccaactagcgttctcctcggataaaaatacttgcatttacttctatatgtccaattcataaaattacaagtatgtcaaacctctgccggcttatagtccagcttgccttggaggcagaatgcatggcggcgctcaccaggtgttgtcaatctggtcccgtagaatggtggtaatttttgcaactctcattactctacgctaattatatatactgcattcttaagtaatatagtgaatcggaatgagtttttttttttttttttttttttttaagcaaattggatcggaaaaacaaggacaagaaatgaacgaaagccttgataattacgagaaaaattacataaaatatatggaaatctttttagaatgaaatgaattcttttgcttcttttccaaacgtcaaagccaacgtactatatcctttttgctactgtgtacatgctacgctctacttcactaaacagtcaggtcagtatgtactattttcggtcagtgtgtactttttgctctggttgtgattaaagctagtttggcttagccatcatggatggtaaagccggcaatgcctaggcacatgttgaaatggttatttttatagaactagctattttggatgaaagtttgagaaggaaacccgagaatatagactcacgaataaagaaacactcattaattattcgtttaaaagatatgagaagaagttaaaacaagaacctttctattttcatccaccattcacacaacaaatactttttgtttgtaagcagcttcttgtgtttctcgtctatttctgtaaataaccaacatcggatagcacacccactttactttctattcttagtagccgtcgttatttatttttagcagtaacccgctcctgccgtactaaacggcattcataaacggaattagtgcagtgtagtgtagtgcattcagtgatcaaaggggatcttattttcttcgattgtcttctaagtttctctatttttagatggacattttaaaaaaagtcttcttcgtgtattgtagaataccttacccccaaaaataaaaaagaataaaaaaagagaatcctgaatcacacacactctctctctttcaaacattttttttttctgtggaattgtcaatttatgtgctgcgaaacttttcgctaatttcaactttacgactcgtaaaatgcttcgttaagcaaaaggggtaggcttatatactattagtaaataaccatcggtccgacaaggcaagagggcaatttcgattatgcatccaattttcataaactgtagaagggaaattagataaaaaagaggtggctgaatcagatgcttttcttttctttttttttaattcattatttgttttcacacagtaaagttttatgtgtacatacgaattcaccaatattcatacactcgggttcccatggaaaacaaggcaatcaaattacgataaaaaaatatatatatgtaaagaaaagagcaatcgttaattgttgttgttgttgttttttttcgaagagaagtcgtatttgtttcttttttttcttagacattttattgttccttacctttatttgttcttccatgctttctttatttacatagggtctccgttacttgatgttctttacctcttcctcgtgctgaaattgaatggaatacgtcatgatttcggtaaatcaaccctttaaattttcggtaatccttgaccaatgtttgtttctcaaatacaaaaacactaaagcttatacgtcatgacatgatgttatctgttcgttgagtggaaggatgatgtcaaacacattgtccaattgcggcttttaaatttcgcttccttgtttatttatggcatcatatgaagaaggagaacattgtgactccattccgcttcgttattcaccttttcaaaacaagaggtttctacgattagcgaggtcgtcgttaagcataattaaagagaagaagatatacaagatggtaatttgattctttatttctatttatattttattttttactttgatacttgtgtcccacttgttaattctatttctatattattttttccacttttttaattctatttctgttttctattttctaattttccgcttgctacttttacttctatttacaaactctatgcctatcgtgcgtgactttctaaacaagtcaaggttttatcgtttcatctaatgttttatggcatgtggaaagtttgttaaccttcccataattttaatatggtttcatattcaatttctcttgttttctcttattctctgttggaaaggaaaaaaagtggttgagagtatcatttgtttctttctacttttctcccctaactattgtgaatctatcatcttaatctctccccgctttacaatcattcaataaggaaagtattaggaaatgttgctgactcccactttctctttccctctccctctcccttgctccaaggggatggatgttgaatgttcagagaccggtattaaggtggagtgcgttgtcgttattctcatgaatgatggagttggagaaaaaaccgattttaagagggaagcgatgaaagctgggggttgaaaaggattggagtggagtggagtggagtggaatgaattgaattgaattggattggaaaggaaatgaaatgtttatgtttatgtttatgtttaaaaggatgatttggttttcaattcaaaatttcaagctgtcagtcttttctttctttataatcgctttttttttttgttttagttgtcatactttctgtgtgtttctgtttcccgcccactttctatgactcttgtcgaattgtcacacatttcttgcgtatacagttggctggcttttttccttctcatttcgtctgtgaattttagataggcaattgaaaacattcacaatgaacaagggatacttagcattctttacaacaacctttttcaacgtttgtttctagggaagcatatttcttcaacaaaccgatttcatctttttacccaattaatttagtaaaggtcatttcaaaatgtatcactttttgagagaatgggtttgttgtgcgtcgttcactaaatcactctcattctagtcgacggaaatattctttttcactgtggtggttgttgttgttattgtttttttttttgcgtttcgtcatttctttttttctcgattatgtggaaatgcaatttgttaatggaaaggctggatattggatgatgcttgatttcctaatcgttcactaatatattaaataatccttgttcaaccattttcatttcctcctgtgttcttccattacctacatttttacttgtttcaattgcaatctaccatccatgaggacatgaagatttctaatttatattatatagacatacatgtttacacacaatgtatatatatatgataatttcttcttctttccgacttggccacttattccaatgagttccccttgtttcaacttgtgtatgtttctatttttgagtcgctaagctaattccacgttgttttcatagacgtgcaggttttcaggaatgggatgaaaatcaaatatccctcttctctgttcttctttctttttctcttctctattgctcttatttctttcctcgtcccttgaacccaaattgattgaattgtttttcatattctcttttccatctccttcccatataattcgagtcgctagttatgttgagcaaattatttattttccatcaaactattcaatcttacacaattcctttgattactcgatccacaatcattaaataatctcacttgcaacttttatacacaatcccctgatcccttttttcgcctagttttcctccttctcttttctacttcatttcagaatttatgaattgcatctcgttgtatgctttaccaatactacccatcacgaactctgctattcttgtttaaaagtttaactcaacgtgctacctgaaattcgtttaccgtagccgaagtcaaaatgcctttaaaaaattttaaaatcctaacaaacaaagttaagttggtttgcgttgctcaacgttattctttttttgcattcggcttctaggaaacactactggatagctggctaatttaaaattgcattttcaaacatcggaaaagttgcgaagagcatcggaagaacggctatggagtttgttggatttcgggtaataaggtaaactttttactactttttccaaattttatttgttccttaaatgtttaagccttttatccatgtccactcaacaaaacaagaaatgactttttaccgcttatttcgtgctcttagccgttgacaatgctctccgggtccacggtactatttgcgtataagcttgttctccgaatttccatctataagagttatcttaaactgattgagctttgataaaattttatccaactttactgtggattagaaattagcacgttgttttttgtggaattggtaaacaatgggagactgggttgctgtttatttacattatagttaggagtggaaggaaagtgcatgcatgttttattttcctctgaaaactgacgttacaaaatttctttctttttctttgtaataaaaaaaattcccatttttatgtcttgattttttccttgttacgataattttgtgataccttgtttttgtcctttttttttttttttttttttctatcatcttctaaacttactcgggcatgtaattaactatatgtttgattacgattattccccattaatttgattgcgaaaacttgatgaagcatggactgatggctggtaaagtagaatgtacgatttacaaaggataaggtgaattattttaattaaacttgacaacagacatttgaattctatgcaacagaatgccatcaataccaaatttgctacatgtctcactaacaacattatctactaatggcggatgttaagaaggttataaaaaatgttttgtctttggatttttttggtaagttcttcctttacaaactttcttttttttttttttttttctttttggtaatcaatggattgcaatacttcttttatgattattttgggctaataaaacttttgctatatataccgcggcttaaatacggtgtaaaagcacggttgttttaagctgatgcgtaatatagcaatctcaatatctttttcttttttaaatcatgaaactggtcattgcatttgagacttctctacgattctttgatcatcaacaatactcactacatacctacctacatacgtaggtgaattagattggcacaaaacaagtgcttcctcaaacactttacaaatattctttgtataaaacccaaagcatgtataataaatccttcaaagaaacagcctattgatcattacgaagattatgtttatgattcatttcaaagttagtagcaaatcatctaagctatttcataaaacgaaatttattctgtcgaaatgaataaattttaaaatacatatataaataaaactaattatcgaccttttttattctttctttagattttttgtcctttcaattgtgattccctccctacacatacttgattgttgttattttcaaagtagcagtcgtaaaagtaatttatgtttagttttcatttctttattttgtgtatacgattttgaatcaataaaaaaatagaataaagaaattaaatgaattaatgaattaaaaactattctcactgtactttgataaaaaatttttcgctacctatagccattggattaaaaagaaataataaatacaataataatattgataataataataattaatacattattgtcagcaagataaatattaaagatacatttcatttacataattgatagcattaaatttcacatacattgtattctttgtttataggaattgtatgaagttgtttaaactgcgttttgcaacctattatttaatatttttcaaccaaagcttggatcgctgacgctctgatttccctttaatttatttatattacttttttttaaatagagactttgaatgatttttttagaaatgcaaacggaacatatcttactctaatgaatgttgaccttttgttcctcgatttaagagctcaactctcaattaaaaagtagcatgtaaaaaaaattaaaaaattaaaaaatattatttaactatgtttataatatggaagtaaataaattttattaacaaggatttaatttaccttgagggaaaataatcatttgcggaatttcaattgttttgaataaaataaaatattttttaaaatattttcaagaattcccaatgatcacgttggtgaagacattccatctaacaattgctttcagacatcatgtttacttttttttatcacccaaacatgaagcatgctactaatggctatgccttagtttaattcatttcaagtttattgctaacgaaaaatatttttaaaaaagtattgcggtcagttcacagtaatattgatagacaccaagcaataaaattacaacattctttagcataaaataatgcattccaaatctaactaaagcaaagaaaagttaagtttcaaagtgattttgttaagaagaaccaatacagaattacaaagagtcaattaatttcaattaatcttacttttaaaatagcaattgaaaggcaaaatacccatgagactttgctaatccatcattcataattatagcataaaattcgttcagtatcagaaaaacaataccgtacacgttatgtatcacaaatattgtaatgtaatttatcaaagttgataaaccaattaagccaaaagtgtacactaccatcggtaaacgtagatagcgtgccggtattttgctatgatatccaagatccgatttgcatagaatttatcttttgcacattcttaatctaattaaatttgaatcatttgactttatgtatcgtcctacaacaacatcttactctcctgtgtatacgggaaatcccctctatgatatttctgcttcgcaaagcgatcctcgacaacgaatccgcaaaaatgttcggtttcaaacagaagtagatgaattcccagactttgatgatagcgacagcgatgagttgcagtttgaaaacagagatcctagaaagagaatcgaccccataaagcacatgctgttagttcaacgcttaaagcgtgtgtctacttcctctcgtcgacttttcatctttactctctcaatgtttctaatcgctttcatcttattaattgcttttgtttccttccgggattaaattaactcttaacaatgtttagagcaagagcttcattcgttttgttggtactttggatcttcggttgttccctatggtttttttcttttatcgcattcccagtgcgcaaggacttgtgaaaaattttcgcaccttcaattgtacatatttatatcccttgtaaatgcgtctctttttgttctcggttagcttgcttgttttacaaacctgtttcctaacttgtcttttctacatttgttttcggtttttctttaaaaaaaaaaaaagagaaggactacttgcttttcatcaattttttatattatataaaaacataaagaaaaacgaagaaaaattgcaattttttgatgaaattgtgctgtgatctgtttccttaatttttgttctctttaatctcaacaatctattgaatactaagtttaagtatggttgtttattcttttaatcctagtcatggttactcattaatattcgtttttcaattaattgaaaagttacttatttaattgagaacgtaaaaacataatcatcaagcatttttcttcaacatttacttaagttacccttgacattgtcctcacttattaatatgtatgtcgtcaaagcatataggtccaagtggttcaccatttatttctaattttttatttaattatttcttttgattgtgactactgcgacacaataaataaacaattgtctagtccaactagacccttaaatactttctgtatcagtgatcattgtagctgcgttacttaatctttcgtatatatttctagtatttctgactgtacatatcactaattacattccttaattttactaataactaatttgcctaataacatgtgtatagtttattattgcaataaaatttattaatttgctctagcgcgcatcctattattacaaattgcagaatcgtaaaccttttcctaaagaaatattacccaagaaccacaatccaacaaaagagagacactaacctatttccaagttctctcgaaaaaaagaaacacagactcgtaaaaaaagatccatcattgatttttaaaatcatgagctcaaagcctgtagaaattttcaacatatcaatagatatatataaaatatgtataatatatgtcattttgtatgcccgtcgtattcgtacatccatttcgtcaatgcaaatgtttcaaatatgcatattctatttaaaaagtcccgtgaataaatcatgcacgcattgacttctgaaactttcgcctcatcttattatgcaataaaacacaacaccgcatactaaattttgccggatcgtttttacataacgcttccacaaccgcaacgattaaaaagcacacccaatgagcatccgtccaagcccagcttaaaaatgaaaaaaaccggacctaaacaaaagacgtttcgtgcaactcactcaatcacagttaattaaagccaaatatttcgccctttctgacatcctcgcgctttgcaaatgtcagcaaaacaatggacacaatacttcggcctctgactaaaggaaatcatcagaagcctgtgcataacacagatgcacgtaacccaataaaaatatttttttaggaaatttaccaccaggattgagcactaccactgttgtaagtgttaccatgatgaggagtacggctttcaaagccaccgtatccagagtagctagggccagagctataaccactactactattagtagggcgacggaagtcgcgagcaccataagcattgcctccacgaccaccacgaccactgtaacggccaccacgtccattaccaccaaagctgctttcacgagccatggcgatcaaaaagctggggcactcttgattggcctcttgcaacaactcaatcaattccttagcgatacccttgttgttacggttgaaaaacgcaacagcttgaccagtgttaccagcacgaccggtacgaccaattctatgcacatagtcatcaatgtcagtaggtaaatcgtagttaataacatgcgtgacattgggaatatctaaaccacgactggcgacggcagtagcgaccataatggaagtacggccagagcggaacaattccaaagcgcgctcacgctcacgttgggtacggtcaccgtgaatgcttgttgcggggaagttgctattcaacaaatagtcggtaagtgtgtcagccatgcgtttagtctctacaaagatcaaggtaagaccctcaggaggtaaggtgtgaagaatatcaagcaagtaactacgcttttcagaatcttcaacgtgtacgaccttttgagtaatattctccgaagtggaaccgacacgaccaacactcaagaagacataatcctttaaaaagtcacgagctaaaagttggatatcacgggggaaagtggcagaaaacatgagagtttgacgttcttcaacgcttgtcatgtcagcaccttccacaatgtgacgaatttgaggctcgaaacccatatccagcatacgatcagcttcatccaacaccaaaaacttaatgttggccaaagaaatacgaccacgatcgattaaatcaaccaaacgaccaggagtagcagaaagcaagtcgcaaccttggtcaatttggcggatttgagcacgaatatcggcaccaccgtaaacagcacagggacgcacccaagaacggtaacagaatttacgagattcctcatgaatttgacaaactaattcacgagtgggagccaaaataagggtggtaggataggctttgcgaggacgataacccataccggcatcctgatcaacaggaacagcggcaggtcctttatcgaaagcaagagaaagaatagggaataagaaaccagcagtcttaccggaaccggtttgggcacaggccatcaaatcacgtccggatgtgacaataggaatggagttcttttgaactggggtgggctgagtgtagccagagagtttaatgttttgaagaagatgagagttcaaaggaggagaagtgaactcattaacaggctcgatatctccaccggaaacttcaacagggatgtcatcatacttttcgaagttaataccagttgaaactttggtaccatcagcaacggcaccaaataattgacgctccaaaagagtgttacgggctccgataacgtgttgaccatctctccattggccaaatccacggttgttacgataaccaccgccgttgctgtaaccaccttcacgaccgccacggtaattattttggcggccctcgccaccaccataatgaccgccacgattgtattcacggcgacctccatagttagaggaaaactcactaggagtttgagacctagaagagccacgagatgagacagactcatcgtcgccaacagctggagctgcgccagcgcttggcttatccctagcaaaaggaggaatatacttcctaggtctgctgatgtttgttttttgcaatttttcagtcacagaaccaactgaatctacttgttgctgtacattgtcgctcataatattttttgtatttctgagttgaagtgtttggttgaggttaggttaagttggccattaaatgctaccaaatacacgatgggactgccctttttaacccctcagcaaattagatatgtcaacgaaaacaatttttaacaaggataaaaagtcatttaaacaatttaaaattattttttagttaattttgataccaatatgtatgggtattaatagtttttttgaaaccttaagtcagtacacgtgctatcatctgactacgttaaagaataaaaattaattgaaaggttttactatataaatatatttataatctatataactaaacatttaggcaccgtaatgtaggtacacgattgccactcaccaaaactaaaaaccaccgttatgctcgtctctaaatagcagacttagtatacatattaatcattttaattggaataagaaaattcaactttcaaatttacaattattagcatacagtttgctttctgtttaaggtcgtagtgatattcaggagtaccagccatggttttgctgtcttcccataccaaccaatactacaaaatatagaaattgatatttttattgtgccttgcaacttaagaaattgctaaaacctttaggcagaagctttgtaagcggtgctgtgcattaaaaccgtatttattcgacaaatccgaacatatttatctatattgaagaagtccaaagaaaatcacatttgttaagattattagatacgacataattaaaagcgtttttcaaaatgattgtccttaatgctctgtcgtacttgggtatcgttttgggattcataggcatgaccgtgagtatcgcatcagctttgtattacatttcagagtttgtagaagagcactctaggctcgcaaaggcgtttttatgtcggttggtttattttattatggcggtaatggtgtttttggttatatttgatggttttcctttttggctctcggcattctccattttcagtcattacatttataaaatcaactttgatacctttcctttcttctcatttaagagaatgagatttttgctagcatgtttccttattgtcgcgaatcatatcttatgggtccgctttttccaggtgcatgaattccctattaaacctcgtggactcacttacgattttgttggtcaacgccttttgacctctcgtgcttccttttcacaagttgcttcatttatgggggtatgcgtatggtctgttcctattggtatttttgtttcctttaccgctgctgacaatacacttcctaccattacaaccccgtcttcctcgtcccctgatgcttattcttctggatcatctcgtcggacgtcgaatgtacttcgacaagcttataaaaagttaggtatcttcgtcgaacgtagtcttacctctttggggttgagtgatcgttcaagtgaacgttacgtctgagttgagtttgagggatgcttgtctttttaaattaaggattcgtttaactttactgtaatgtctgtacttcttatgtgatcatttactcacaacatgttgcatctcttttttttttcgacttttattttgtatatagttttcttcatactttcttcatcaacactttaactttttctcggtcagtttgagcgaacaaaattatccttcttttacgttttgtcgttgttctttaggattgcctattgttatttttttcaacatggaaattgtattgtcaatttgacttaaatttcatctcggacgtgtagaaaatgcatttaaaggaaatagatgacgccttttcatattcatatgaaacggagttttttacgtcttgttcataacgattttatcaataaaaattaacatgatagaaagctaaatatatccaagtaaaccctagccacttgtaaaattgataaaatacacatttaattaatcagtatcgactatataataccgagtcctaaaaatacagcagacatcatcataatgaccatagcacttaacggagaaaacgaatttccagcatttgcaaccgcattctgagaaatcaaagagatgttgaaggacggaatagctgaagagggcatactactactacttgtataggaataaacgacgctttccgaaatattcacagcagacaacgatgtggatgtgaagtgactagtctgaaccaattgagtagatgccacactcgtaggatattgcgaacaagttagagcaccaggaatgtgttgatccacgatggcggacaagttggatgttgcgttataaaaggcttgcccaatggcaatcattttttgactttgatgataaaatgtgtaggcgtttcgaaaaaataacaaacctaatacaatctcactatccgtcgaaggtcgaatacctaaaagacatatgtttgaaacttgcccaatcactagcaacgatatcggtaccttgatagttgaattacatccaaattgaaatatcagagcggcttccaaatcaatttcatcacagtttaatgcgaaatagccttcggataagtaggcaccagcattatccatcacactgtaagccaattcggcaggcaaataaatataagtttcacgagtttgaaagtatgcatcagtgatgatagaataattagaaaagaacgtagagtttaagaactgcacagagtaaatggaaacggcgtaatgcgtaagcttagtctgcttcaaagcgacaaactgtccctggtactttgacgtatccacggctcccaaaagtaaacttccattaccctgattatccagatacatactaaaagcagggtatgccaatatatcctctttaactagttgttccaaaaaggttggtggtgaaaaacttgaaatggaatccgaataatctattgaattaatttcggtactggcagctaaacctagcacgcctttgtacggcagcattgaactgggaacatactcctttaatgtgatgccgaattggaagtccggtaaagcttgataatgactgtaagaaagggagtcctgaacattaattccagcaactgtaatgttatcgtcatagcggataaaaaaagtgcttggactcgtaacaaaatggaagctagaagatgcattcccaaaataacaagaatcactttcttttttacaaagaaagtatcgcagttcatccgtactccactgagtaccactattcactatgccaagatacgctggattaaacgccattacattgtagtaagtcaaccatgtgtacggcatgtccaaatctatagctacagtgtacgaaatactcggacgaccgatcgaaagggtagtagtgtagtaagtgtaactctgcaaatctaaaggaaatgaagtgataccagatggagaataagtatagtcacgcttctctaattgattttcctggttgggaaaagttttcgcaacgaagtccaaagctaaaacaccatttcccgtatattgtaacgaagagacaagtttaatgaaggagaaaaatattaaaatccaaatcctcataatccttaaataattagaagaaaatatagatgcaagaatgtttacatagaggtaaattaaaatgaccaaggtgattatcagataaaaagagaaataaagaataagaataaagtaatatgagaagaagaaataagaatatgcaaaacggaactaaaacaaaaatgcaaagtagaataaagagcaggtgccgagttcttttgatgaaagaatgttttaacgaaagcaacgatgaattgttattatcccttgttatgttgggagcaacaatttggcaatcttgctttataaagaaaagaaaatccacaacagaaagtggaaataatcctcaagggatgagcaatagatgcatgtaaaaaccaaatgcaacgcaaaaatctagaaaaacttgatcataaataagagtctttcacaattcctagcacgtcgtaaaataataaatacaaattgaaaataagggagaaatagatcacttaacgatagtttttttagaatgatatgatagtaggtttggcatgtagctcaactgaatgtatttttgaataatttaagttgaaagggaaacgtttttaaagctttgaaatatgccgataacctttatggtaacgtctcaacttttaaatagaacaagcgatttctccgagcaacaaaaagacgaaaataaaagacagtcttattgctgtacttgtagttcaaaactgtgtcctagtagagtgctatttccttgtttttctacttcacctaatatggtggttgattgcgggctcaaatcccttggggggcctcaacaccatcagactaacttcgttcacattaggtctgaaagtatacaggatccttgagttctttatatcatcatacaataaatataaaagcaaaactgtgtcttttctagaatacgatttgtatgctttttccagcgtaattccgcttaaattgggattatgaaacaggtacgtttttacgagtcttacgggccttaaagtgataattttattgtacttcgataactaattaatatttttaattaaaaagaaggagaccaaaaccagtcaaattgctttagtcgatggtgaaaaattatcgataacagattcttttgcctccctttttactctagacgaagaagaagaaaacgactctgtagacaatgaagagattaagttaacaaaagagaaacatgaaaagttacttcttttattttggttgcattgcaagtttcctaatggattagaatggcttcattcatcaagtgatcttttaccagagcaagtttctgagtggtttaacttttatcaaaagtatcgttttaaaaggtatgtctcattgagtaactttttgtattttcctcaaatgtacaactaacatgcaagggggcgaaattttaatctttcagctagagaatctgtaactcctatcgttgaagaaccgatagttcccgaagaacccgataatttggaaggagtttcagaggagacacctttaaaagaaacttccctagaacttagcgaggaggaaattataacgtcaaaatctcccataccttcacctgaaactatacataaaaatattgacgtagaagagaaagaaactattgaaccaacaacacccgtaaaagaagtggaaaccactgctcatgctgaagaggaaaaaggccctttgacgccagatagcgagtatgctgctcgacagcttaccgaagaacttgcaaacaaatcctctcaagaagaaggagtcgataagcaattaagagtggttgaagctaccgaaaaggaacatgaggaagatgggaatgaagaaaatgtgaccgttaccaaaccggtagaggttgcgactgatcaagttgagtctaaagaagtgaaaaagaaagaggtatcagagacaacggaacctacggctccccctgtcactgttgcagaagttttggaaattgaagataaagtcccaaaggttgatgaagttgaagaagttcattctcctgaagccaaggtcactgaaaatgatgttgagaatgtacaatcaggtattgatattgaaaaaactatacaattattaaataatcaagagattccttcggaacaacaaatcatttccgttgacaaggccactgaatctcctgttcaggaagtagcggttgatgtcaacgagaagccagtagatgaaattgttgagcctagtaaattacaaatggaaaataagttaccatcggaaaaatcccctacaattgacagaactggggttgaagctccgctttttgaactttctgtatctatgccactaactttaattcctccttcaaaattttctgaaccggtgaaaccagagctttcctcagaagcatggctgcttcgaacagaaatgtcgcctttacatttaaggttgaaaaatgcacataaatatgttctatcagataactggtctcatgcgtatcgcgaggaaattgtacgacaatcactacatcatttaacggttgcaaaagaaaaaggtatttggtcctttagacagcccaaaagacaaaacgagatgccacgattgaaaactcatcgggattatgttttggatgagatgcaatggatgtcaattgatttttctcaagagcgtaaatggaaaattatattggctcatagaatggcgaattgggtaatggattaccatcaagctagtgataaatgtactgtttgtactccggcttcgttgtcaaagaataagaagccgtacatgcaagagaatgaacatcagaaagactctcacgaggaaacgtttaatgaacaaatagtgagccattttaatctaaatgataataataacaacaaagtgctctctattcccagggattctttacagttttataatgctgttttttcggatgatatatttgtgacaacaaactccgaacaaattcagaactgcgttttaaacgttcctatgtacggtcctcctactgaaaacaatgaatattgtgaagaaatatctgaaaagtacccgatcactcctgtgtcacgttttgcatatgccaaaacaaagcttaaatccacctgtgcaaaggcttctaggaaacgtttgttcaaccaattggaattatcaccacctgagtcgtttatggaaaagaaggcgagaagcgatgagaaccagctagatggaaataaaattaaggatgataatcagaagctatcctcagtaggaacctttagtgtgcggcctccgtatccgccttctagtaaagatattcgtccagaagccccttggttgcccgaagaagatgaactccttttattactcttgcgacgatattcctttaattgggaatttgttgccagtaggttaacaccaccaggtttgtacataccgcttgccgagaagcggactgcgtgggattgttttgaaagatggattcaagtggatcccagagccgccaatgtccaattgactggctcccatgcaagactcgctcagcagaaattagatgaatccttaagacattcggataaagttagccaacatctatccttacgggatgaaggaacacctaaccatttgattaaacataattcttacttcttattgccaactgtatcaagacattaccgacccattactatatttgaagctatacgaaagatccttaaaaagagagagtttgctaaaaaacccactatgaccaagagagcgattgcaccatctgcagcttcaactgaaaaattgccgccggttccttcccctctcgaactttctcgtttgaaatctgagcgtgaggcacaaatacagcaaatacaggctcagagaaactttgcacaattgcaatcacaaaacagggctctacggccgcaaaacgccgctgttgctgctggtgcacaacaacacaaccagcaactagcagcctttcaagctgtagctgcttcacaaaatagtagtaacaattcatcagcgggtgtctcgcctatagctggtagaatggtccccaggcttcagccatacgctgtttccagttctttaaaactaacacctgaacaaattcatcagttgcagcaaaggaagcaaactgtacctactactgaaaggacacagtaagtatcgcctcaatgcaatttttcgatttattgtattttttttgagtgctgttgtatattagaaggaaattacgaggcgagagctttttctctcacacaataaaaatagaatacgttttcattttcgtatcccggttgttggttttttaacagaatcaagcaaatcgaggtaatacgaagtgtacatgataagtgaagtttgatttcataaacgttattttagctaatgaatatgttttaatttttgaaagacagacaccattctcggtagacaaaaactccatgtgatgggccttgtagaagcgggcgacagtgtcatataacctcgtcgtgggactttgtttagcttcttagcagtctttgcattcgtccgagtgttctgtccattaacgggtaacctgaaatattcattagttaagttgaaaaagttgtcgaagacagctacgttcacaaatgatcttttcatacccgtttacatgtctcattccccgatagcatcggatattcaccaatcttgagatatcagcattccgttgacgccgtaagtcaccttcaatagtcattcctgatagcagttgcgacaacgttgtcaattgaacatttgtcagctctcgaacccttaacgtattgtgaaatgataattttgcgcatatttcttcagccttggcatgtccaattccataaaaagaaagtagagcaaaccgcacaggtttatcgtcgtttacagccactccaagtatgtataccatgatgcaaaatctcagatatcaacagatgagacagaaaccagctcaataatgaagtggacaatttggttttgtaattcagttctctatcagtaatcagagagcttaaaaccgttctgaatataagtattaggctttcttgtaaaagagtggagtggtggtgtttagatataatacacagttggatctctcatatttttagaaaactagttagattgtacagactccgggcctagtaataaaagacaatttgagtaatcattaaagagctactatctaaggtgtaatttgatgtttaagaagaccataaatagggcaaggtaagacgaagaaaaacaaataaagaagagatatcgtcaaaggccttccttttctgttcaaattttaaaatttatgaactcaaatgatcccttcgttcaatggtctcagtttaaaatttattattgaaaaatatattcacgacattactgtctcttacaaagttgaatgttcaacagtacatgcggaagtacagtaaaaagttttggaataaaattttatatattctaacaatgctttgcggatctcaactgtcatatatatttcaagtgcagctcctttacattgctatgcttgtgcaggtcctaggcattttaaatgagcagtagctttccgcatttcaattgaaacttcagtgctttcttcttatatgggatatgactaattttatcgcttaacacaattggtagtgttcatttttattattacttaagcaatccgcaaatcatgtggtttaatagtcagtttttaaattgatgttttatttaactttaaaaaacaaagcaactgaaagaagtatagtactgtagatttcagtaatattgtaactactatacgttttttctttttttttttttttttttttttttttttttacaatatgaagactaagatgaaaattaaaaatattattgcgaataggaatacagatcgtatggtaaaataatagatcgaaaatagcaattaatttaaaaaattgcttcacatggctttgtaaagatgtgtgggctaacatactagaaaataaaaaaaatatgaagataaaatgagtttagctctcaaatttggcagtaatattgacatctgtaatagtggaattctctgggacagtcatgatataaaactgaagaaagcgatagtattcttcatcctcttcctcattctcttcatcttcttcagtgcgctttttcaagttgggtctgtcaggattaacaaaagtgttccaactttggtaagcacgaaggaaatcagcataagtttttgcgggagcagcttcgaattcgcgctttttcaagttgggtctgtcaggattaacaaaagtgttccaactatggtaagcacgaaggaaatcagcataactcttctctggggcagcttcaaactcacgctttttcaaattgggtctgtcaggattaacaaaagtgttccaactttgataagcacgaaggaaatcagcataagtttttgcgggagcagcttcgaattcgcgctttttcaagttgggtctatcaggattagcaaaagtgttccaactttggtaaacacgaaggaaatcagcatatgacttgctaactgaaaccacaccaggatcggcaactggaataggtgaggcagcagcaagtgagaataaaagggcaatgacagcggtgatcttcataatgtatgtgaaaaaaataaaatttcgttgataagttagaaaaagaaagatagtttaagcgatgaactagcaaataaaagaagaaaattataatttgttgactgattcaaaaaaagggagagtttaaaaaggcaaaattccaaaagaaaaaggattaaaagattagaataagaaagatcgaagcaaatttacagaaaattagctaacggagcaggtttgttgacaagagggatgtaaattcacacccaacgcgagttcttgtagagtgaagaataagaaatagaaagagtgaatatgtaaaatagaagacttgaacgaattctggttttcttctgggacagaatgcctgtatttatacatctttgtagtgctccgtttccctcaattcaaatctggaattctatgctttcaaactgttcattgttgacattaaccgccattttttaatgacttccccgttttcgttttatcgctgtttatcctgattggttgaagatattcgcttatttttttgtcgtccacccaaaatgaacttctatgtacagcgaccaatcaaaagacttattaattttaagcgacttttttctggtagcggctattttttttattggttaaaggttttttgataatgtaaacaataaaactctatccattgttctttgtgtgtactcaaccaatagcataccgccatagaatgaaaaaatgaacttcagattgaaggcatagaacgcctctggctacttgtagcagatatagatactgcaaagcaactaaaatagagcttcaaaggagatggagcacgcaaaaaagaggagaataaacaaatacccgttcccctccgactagtgggccagtatttggtgtactagatattgtgcacggagaaagtacaaaggattgccgttgctagcatttaatttccaaggaaaggatagtaatatgatagtaggaaattgtttgataccattagtgctttttttccctcgaacatgagaatcagggcttgctaaaaccatagtagtgctagttccgagaatcccaccttttcattataccttcaaaaaataagagtacatttcgaaaaggttttagtaaaaggattggtgaaaataacgaataaactgctgcttctttacagcttttttaattcttttcggcgttaacatgcttcctttcgttctaaagtcatataaccatatcattatactaataaactgtttaatataattttactcctttattatgacttcgcgctataccattgtatttgttaaattgctttagcgcgttaaatggaaagcattgatcgcaaaatccaacgtttgcaatacttgcggctatagactggagatgatttaagaattggtgtaataaaaggattctgtaactcatggtaaacgcttctctaatctgggatctcgatactccttagcgacattttcaatatagcaaacatgcaacagagatattcatttataggttggatgctagatcgagaggttcttattcatacattgtcttgaattttttaattttatgaaagaaaaaaaaaatcttttttttctattctgctcagggcatgggccgcggttattccgcggcccatccatatgttttggctcttccatcttaagttgttggttgcgtttagattcgtgttcaaagttgcttacaacatactactgtattattgtacgagtagactccatatacttcaacagtacaaagtctccttgtatattaatttgttttagcgcgcttttctatttttttactgtttttccactcagaccataaattaaataggtatgtagcgtaaatgtcgaaatttttttcctcttccattttagtgcaaacggatgcctttttgaagactcatgctgaaagaaacatgaaaaagttaattctccaacacttttttacccgctcaaatagtgtttcacctattttgcaaatccttattggtatgggttagtgtgtttctggttgcgttggttattgagacagtaatttcatcgttacattctttaaaaggtttttttttttacgactgtgacacaaacgcgtaaacatttgagaagagaaaaaaaaaggaacttgtgtgctcatttcattccttattttataaccagcattcccaatttactaatgtgttgtagacaatgtataacgtgatttttgttttaggcggtcctggtgctggaaagggtacacaatgcgatcgtttggccgagaaatttgacaaattcgtacatattagcgctggagattgtctacgcgaagagcaaaatcgtcctggcagcaaatacggaaaccttattaaagaatatatcaaagatggtaaaattgtgcccatggaaataactatatcccttttagagactaaaatgaaggaatgccatgataaaggaattgacaagttcttgattgacggtttcccccgtgagatggatcaatgcgaaggttttgaaaagtcggtctgccccgctaagtttgctctttatttccgttgtggtcaggaaaccatgttgaagcgtcttattcatcgtggtaagactagtggccgttctgatgacaacattgagtcgatcaagaaacgctttgttacatatactaaagccagcatgcctgtcgtcgaatatctgaaatcacaaaatcgtctgataaccatcgatgccgagcaagatcccgatgcggtttttgaagataccgtaaaggcacttcaaccttacctgtagagaaagcaatgcttttgtaaggcaatcatttgagtgctatattcttattttcccaactttcattatatctttgcatcaaatatactgtccgatcacggttaatttgttgtatattaatttaaaaaccttcttttttctttccgtagccttgccttaatgatatgtctttattgataccataatgccaaatcactgcttgaactgctcagtaacgaaagttcgctgaaaaaaagatacatatagcaaaatgagttactttaacattgaataataaatcaatctctagaacgttttcatcaaaacgttcacataaaaagcacggtttgtagtgcacaaaataaataccatagtgtattctactgcaaaacgaaaccataaagggagctaaacccagacataaatgagtagattttttccgataatatgttcatgagttaaattaaaactataactatttgttcacgttgttttggtaaacaatccctaattttctcctaccattgctaacaaataaccgtaaattttcataaccaaccagcacattagcaaaacaatatactggcatttgcaggacttgatttacctgcaactcaactatttactctgactatccaaccattaacgatggcatacatacccatacagatgaaccacaccagacatacagacaagattagtcggaatcgagttacctgacaaacaggtgccacacattgcactaaaataaatcttctcgaatgcgtttcaaaatcaggtacgacaaacgaggccatactgattgaatttctggtacattcggcagaacgttcgttcttcgctcctcacgagcacgcaacgaagatgtttctccgaccttaccccctcaacgagctgtgcgcttttcaacgcgtttgaatttgaggaagtgcggcgttcgcccgtacgtccagcatggttcttcggtacaggttatgttttttggcaacagcaactattcaaatcaactgaaagttttttagaattcaacaacttccaatactcaagtgtccaagctagcaaactgtttaataatcgtgacccaacattcctttcatgcgcaccctcagcgtcacataaatcaacactttacaacacctattcaaagcttctatatgccttcgtcatttaaatgtctaacatttcaaaaaagtgtttgctaatggtaaattcttgagttttcttggaagcacatatataacgagtgtgactgttctacgctccttgctgactagtcatcagtctacgcatgccaactaccaccaacataagcaaatggtaagttagcaaggagtagcacatcacattaacaaacagagttcaattggtactggatacgatttaggattattcttctccccggatggtcgtttattccaagcggagtacgcgtataaagccgtcgaaaatgcaaggtaaggtggattgaatttccttatcgattgattttaacattgtatttagtacttgcattggaataaaatgtgaagatggagttattctagctctagaaaaggtagttactagcaaactacttaagccgcgagtaaataacagaattgggtcggtcgatcgacacattggtattgctactactggctttattcctgatggccaacacatcgtaaaacgtgcaagggacgaagccacctcatggagagataactacggatctcccatccctggaacagttattgctgatcgcttggggaactacgttcaacttttcacttgctattctagcgtccgtccattcggtgttatgtcttttgttgctacttatgactcagaaggtccacatttgtatatggttgaacctaatggtgtttattggggttacaacggtgctgcagctggtaaaggtcggcaagtagctcgaaacgaattagaaaaactgaatttttcctcattaaaaatgaaagatgcggttaaagaagctgctagaatgtacgttttgctttgttgagtacaattttttttcattctatttgctaataattcactcttttttagattatacgcaactcatgacgaagaaaacaacaaagagcatgaaattgagatgacttgggttggtgttgaaacaaacggtattcatacacccgttcctgatgagcttttgcaagaggctgaagcatatgctcgtcggattgctgatggcgaagaagaggatattgctatgcaagagtaaatgtcatatgattcctattatactatgttatgatttcccatttttattctctcttcatgcctttttattaccctactgacctcttcctctccttttcttatttttcctccaaaattttagccaagtctttgtctctcgattagctattccatcttccgtaaccgtcaattataaacaattttacgagaacgattatctatagattccttttatcgcttttcttatagaatcaatacacccgtttaaggaattaacatttttatcttgttagaatatggcagattctacttccttaaatctttggagttataatcttcttcccaactttaattcgggtctatcgatttgatatttaatgtgtatatgtattgacctatttactacattttcacagtgatattaaacaagtaaacatttttagcattgcgtgaaatccctaataacaagtagagtatacttttgaaagtgtattatgatatcagctgtatgagaaagttatttgcaaccaatgcaatactcattttagcttacaatttttttaatgcaaaatcgtaaacacgaaatcgtttaataatcatacaccgaacttactattgagtgaattaacaaaagcaaacctgctgaaatacttcacatttctattaagtaccaatcaatttaattttacaactacaatatccatttcctatgctcccaattaagacaggaacaccggatggcaatcactgactatgcatcaatgtcaatcgataatgtaattcaatattaacaactattccaaaacaaaaaacattcttaaatctaatttcatgtagtgacaattattgagatgattatcataaaaaaagaaaaccatctcacccaatcgtctctttttataaatttagtcttcagttcaaattatcttttatattactgcatcaagttttgaatccgcagcacttttattttgactgttataataagcgttgttcgtagttccctagtaagaaaattcagtatttatatagcacatgatcaaaggcagtcacattccttagggttttttaaactgaaagaacgatttgccgcaataattcgcaatttaaaattaagtgacttacaaaggttcggtatttactaagcaagcttgaaagaatcttttaatagttttttattgcaatgtttactttttttcaatatacggtaaatttcttcaattatctaaaccaaataagcatgatgagtggcaacggtaaaaaacagttgtgcggttaccatacttattgtatttgccatttgtaaaccatgagttgcggcttcttgagcctttattataaggaattgggttcgttactcaccagacaaaataattaattaattcatttctttccctaatatctaatatctatttctaattgattaaataaataaaggggcctagtattccttaaaatgccggtgagcttgagatttgtaagttttattgaccgcttctacccaacattaccgccgattttgaatggggatgaaaaatatagaaaccaacagatacaagaaattgggtaattctctcgcaattaaacgaaaatagtagtaaattaaaagaattaaattgttaggatgctaaatactagaagaatgacagtagggtttgaaaagctttggtagattcacatgaattaaatagttcacagtatcaattgaagaacatttgggaatatgctctacaccatctcactgctttgctaataagtgcccaaaggaaagatagaatatttataaggatctatgtagaaaacgattgacgaaaaaaagtgggagcagttgtcttaacaaaacatcaagcctgttctatcacgtttggaaacaaatgaacgaagatgagatctcattgaagacgaaatgtaaaagaaaattaaaaagaatacattctttgagaattacagaacatcttaaattaatgcttatgatcaacgtccttagcagcagcatcttgggttgtcattggaatgtaagtgcctcttgatggtgatggcttgctttcaggcttagtgtagagaaaagtagcagcaataacgagcataactccaattaaaaatgttaaggaaattttgaaatccatcaaataaacacttgcgagagaagaaataatgatgctgatacttgttgagaaatttttcataatgttatcagcaaaagcgacacataaagctacgataatacctcctccagcttgtaaaaggattgcgagccaaacaattgaattataaccgaagaaaaaaccgttttcagcaatattgtgataatccttcatcaaaatggtgaaaagacaggggaagagtgaaaagaaggaaagttgcacattgcgaacccacaaggaagggttggtatccttcaagaccttttcaaaatacacaccagctagaccactaattaagcacgcgacgagtacagcgctaaagccagtaacgggattcataggtcctgccgacatttggtcgtctgagttaagattttgcaactgaacgatggcaatgccaccagtcaataagaaaagagaaaaccatttcatgggaccgagtcttcgatggagaagtaagatagaaaagatggcagtagtaagaatcttcaactgataagtaacttggaaagatgcggcagtaaggttgccagcagcaacatattgaagattgttctggcaggtgtaaaggaatgctggaattgcaagtttccagctgtcccctccaaatatttgaggaagaaatgcgcgaagttttgcttccttgcctacgtttttacggaactgatgatagccaaccgaaaagcaaacaactagtttaataagttcgtttaaaaggacggcagttgatgtaaagtaacgtttatcatcatatccaggcatgattcgagaatagttaagtgtctatttaaccattagcatgtacaataggaaaaacagaaatatatttctacataaaaacagcgaagcttttctaaaaaaaagtgggagacatgcgtgtttctataagaagattgaccatatactccacaaaccagagaaattcacaagacttcctaaaaaaaccgcgactacttaccaaaatcaatgcactattttgcactgttaaaagtaccaatgcaatgtatttcattggaatacctttccatttgacatcgtcgcccttgacagccattttctcaatattactggtattagactagacacttgtaaagatgtgaagtgctcggacttaatgaaatattaatataagcaaaaggtagttaacgaattaagaatttgcaagaaaaattaaaaacctccaatacttaatacgctcaatccggttaatagtaaaacacgttcgtgttggctgctggtacgacaagaactaactgcccaagcctttatagtatccaactgatttacggagcacgaggtaaaatcgataaagggtcattatgaacaccaacaaatttggaagatagccacgttaagctaagttttgcatttgccacgaacatgtgacaaagcgggtttgtgcattcgaacgcgttgagtacatacatgctgatatccgactgcaagcgttaaacgattcttgttttctcatatttctgtattttctttaaagtgcattaattttttagaaatatagggtaaaaattctacgattttgattgcttctggagtctttatttgctttcaggatttacagggatatcagattgttataacggaattccccttgatagccgaaggttagatcatttgactgttatagttggtaagttaaagttttatgaatcctcaaatctttggcttatacatagaggtattcggtttgcaaaatatcgtataaacgggtcctataagtagccgccgaacttgacattagttgaattggactaacatgattgagagattaaagattgctaagaacagacttgaagctatgaattcttttaattttcccgcccaggatagacatgaacgagcccctctcttgggatcagagtatgaccactctatggctcgtcagttgtcgcttttaaacgtggtcggcatgaccaaatctgttttgatgtctagctactttaacttgatgttggtatttgttccgatcggcttaattgcaggatggtttgaatggaacgctaaatctgttttcatacttaacatgcttgctattatcccccttgcatccttgcttagctttgctactgaacaactctctataattagcggaccaacattgggagcattgttgaatgctaggtaagattcctactttatcgtcttcttttgttattttattaacacgttgtgtacagttttggaaatgccatcgagctcattgtaggcgttcttgctttgaaaagaggagagctccgcatcgttcaatcgtcccttctcggatcaatattatccaacttgcttcttgtttttggaatgtgtctcgtaactactggtattcgtcgtgaaattaccacatttaatatcactgttgcacaaactatgattgcaatgcttgctttatctactgctaccatattgattcctgcgactttccattacagccttcccgacaacgctaatagcgaaaatgcgcttctccatgtctctcgtggaactgctgttattgtactcatcgtctatgttttacttttagttttccaattaaagactcataagcatgtctgtcatgatcccagtgaagtggaagaagaaactgaacctcgaattttaggccttcgttcatccattgccatgcttgctatcgtcacggtttttgtttctctttgcgcagactatttagtaggttcgatagaccaattggttgaggaagttaacatttcaaaaactttcgttggtttggtcatccttcctgttgtaggaaatgctgccgaacatgttactgcaatcgtggtatcttaccgaggacaaatggatttggctttgggtgttgctattggttccagtattcagattgctttgtttttagctcccttcttggtaatcgtcggatggatcatctcccaacctttaacactttactttgaatcattggaaacagttattctatttgtgtctgttttcttggttaattacttgatacaagatggtgctactcattggcttgaaggtgttcaattacttgctttgtatgcgattgttgttctcgcctttttctactaccctcaataaattttgtcgttccctcgctagttccttattatgtctactcttatgtgcttgatatactctcttgatttctttgtgttttactttacgaaactatcataccgaacttattgatttcttatttttttatactagattttttttttttttggtttctgttacaaggatattttgcagacttattttttagtatgcaagtgttaaattatgcagaaatctcccattttcgcaatgactacacaactctaaatttctattgcaggtcaagccaatatctgcttgtttacagtagctttttaagtcgctcattcttcagtctcagtttcatgtgtcttaccagctatgaaaatagaaaattaatttttgaataaactcttgtaaatcgttgtttataaatcttcattttgtttatttttattagttgttttgtaggttgtgttttacatgatttaataatacaagccattagtatgtgaagtggttaattttaattcttcttctgtttctgtatattcgaagaaacagaaaaaacttcttatctctttcattggactcttccaggcgtaagtatgataccctcccccagcgtcaagttggcacttaccttctaatttacgcacaatctttcatacattcctactcttgctctttgagtgttgacacttttaattttatacaaaagctttcagtacaccttctattaaactatatactggctattttcgttctttcaatagaattgtacttgtctaaataaactttccaatactactacactcacatctccttctttgttttatttattttcatttagtggaaggtatagggttctctagaaaaggtttactaattttttggaagacattgactacaaatggaaccattagatgctggcaagaactgggtgcatatggatgtcattgagcagtccaaggaaaacatagagcctagaaaagctggtcattcagcttctgcacttgcaaaatcttcgtcgcgaaaccacaccgaaaaagaagttgctggtctgcaaaaagaaaggatgggccatgaacgaaaaatagagacgagcgagtctcttgatgatccactacaagtttggatcgattatattaaatggaccttggataatttccctcaaggtgaaacaaaaactagtggactggtaacattgttagaaaggtgtactcgagaattcgtacgaaatccgctttataaagatgatgttcggtatttacgaatatggatgcaatatgtaaactatatagacgaaccggttgaattattttctttcttggcacatcatcatattggacaggagtcctcgattttttatgaggaatacgcaaattatttcgagtctaggggattgtttcaaaaagctgacgaagtttatcagaaaggaaaaagaatgaaggctaagccatttttgagatttcagcaaaagtatcagcaatttactcaccgttggttggaatttgccccacaatcattctcttcaaatacaaattcggttaatcctttacaaacgacatttgagtcaacaaatatccaggaaatatcccagtctaggactaaaatttctaaacctaaatttaaattttctgtttattcagatgcggatggttctggaaaggatggccaacctgggacctggcaaactcttggtacagttgatcaaaggcgtaaagaaaacaacatatcggctacttcttgggtaggcgaaaagttgcctttgaaatctccaagaaaattggaccctcttgggaaatttcaagttcattgtgatgaggaagtatcgaaagaataaccgataaagaaaagatttaaagtattggcgttattagattaacaactattgtacatcatgactcccggaataagaaataggttgaaacatgcgaattttaagggttatacgaacttaacataaagcatcttatttatactacgatttgcagcttttttttatattttactctcaaattaattatagtcagccataagttaatgaatatgatataaataattcttttatagacaatttatcaaaataataaacagatagctcgataagtaattacacctctatacaagtaaagctaagaccccttagctataaatattttaactaatgagaaggcccctcaaaaaccacagaagcagctttgcccaaacgattcatgatagctagcccttcattttcctcggagacaccttcaaccaaaacaaaatcaactccctgcagatccaaatctcgcaattgagcgaataaattctttgtaatttcatgtccatcccttcccatatgcaaaaatacaaacggacagtgagaagggaatgactcttcgttccaacgtttactacataaaacaccaatcttctgcttttccttagtgattccctgctcagataaatacttttcaaaaacaccgtatgcatcagattctgtgtaattgacaaaaagtagcactttggcagttggagagtagtgtctgtatttcataccaggagtttgagggatgaaatctgtttccatatcactttttttagctacgaatacttttgttcgctcccaggcccctccagagctttgaatttcttctaaacttatgcctcctggccgtaaaattacgggaggatcacaaagtccatttacaactgtactctccacaccaacaccgcatgctcccccatctaaaattaaaggaattttaccttgtaaatcattgtaaacgtgcttagctaacgtaggagatggccttgttgaagcattagccgatggtgcagctaacggcgaatctgaaatagaaataagggcaagcgcaacaggatgttgaggcatgcgaacagcaaacgttttttgtcctgctgtcacaattggtgagaccgggggattagcctcgtcaacaactggcagcaaaattgagagtggaccaggccaaaactttttaatcaacggtaaataaacttttggaataatctcctctgagtcatgtgcttgattttttacttctgactttgctttaggatatgcactcaacagcaatctacgtagctgatccagagaagcaacatgtacaatcaaagggttatcagcagggcggttctttgctttgtatattgacaagactgcttcagtccttcgggcatcagcaccgagaccgtaaactgtttcggtaggaaaagcaactggataatcggtgtttctcaatatattcgcggcgttctctaatgcagaacgagtttctgagggaggtatggacacccttgtgtgttcaaaaggatgttccgaatcattactaggcttttcaaaagagataaggcgagtatcaactgtttgaatttttgtttccattgtcaaggaagaaaacctaagtttctggcttactgaggccaattttgctataaaattgtaatacttcagcttgttttatgttaattgatttagaaagaagaagctaaatgctgatagagagaagggtgaagttgattgctattattaagttgaagcgcatcattgctggttgtcgactcttgcaaagtaagagaaataattgttgaagatatatttaaaaactcaagattattttactctaaatacgaaaataaaatctcgtttgagaaattttactagagtagtgattgacgacgatctttacttaaaatttgaatttagctacagaggttgtaaaaaagaaatgtaagcgcgacaatgatttcacgaatgaaaagaacccacttactgtttttatttgtgggtttttttttatcgtttctgttatttggcagggtaagaatatattcttccaatacatcccttttgactaagcatttagttaatttgctaatgtccaatgcatcaatctaaattatatagctgaatgtttaacaaacaaatttgactttgaattaatcgagactgattgtgaacttctataaacattcgatcatactagatttttcaagctacaattttaccataatctatttcatagtaaatggccagaaaatttttggaaaactaacgtacccaagatgaattataaggaatttttatttgggcgtgcaaggaatggtcgaaagaataagcataaacattatatttacatgagattatagacatgaacttcacatgatcaaagaagaacgagtttcattcctttgtcattattgttacaatataaagtttcagaagaatgaagagaattaaacaatacgatccaaggatagcaataaaagtcccataacggtaaagatgcaaaaaagcagacgagcggtccgactacttctagatttggccttgattagttgttgattacccccagacagcgaatccatgacattaagggcatcatcataaagtttttcagccgcacttgattgaatagatagttgagcggatatttccgactgaagtctagtaatatcagccaaagatttccctgtatcacgtaaacgttccatagtatgttcaaattcttggagtaaaacatcgttctcttgctcaagttcttgaagttgctgttgagtaaaaaatgtttgtaattcagattcagggatctcaacagctgaattttcatcagtaggattttttgttaaaaagtctgaagcaatgtttcgcttttcctgacctcgttttaatctcagatcttgtaaatgatatagaacagaagaaacatcggaaagttcagactgcagataccacagaacagatgaatggtgggcgactaaagtttcctttttcgataatttactagggtctcttaaaccttgcagccaaccactttttttagggatttgactttgttgttctactcatgcaattagcaagcatgtccctgtgttttgtttataatttaagtaaacataattttaccagtattaaaattttaagcttacctttcacaatctcctgcaacttagctatttgatgaatacagctactgattgccgaagagacttcatgttctatttcatccctttgaacctcatctagctcaagctttgaaagctcctcaagtgaacactccattaaaggttttgagagtctttggacatttgaaaatgttctgtcctttaaataagctccacgaatctttttcaaaaatactagaagattaacaatcgtttcatgctgctaacgttagcaatttgaactctctgattagatatagaaagcaataacaaaagttaatactgtcaaaaatttaaaccaatcccactcaataattaatcgtatattatggtagcgcatctccacagtgatcaattgagttgaggttaaatttccgattggttcaataattacagaaaactcgtcctcaaacttacaattctatatccttcagccaaaaaaggatccgtataacttattcttttcaaaggaatgtttgctgcatcaatgtcgccattttttgttaatccaaaaaactcattcgtacgactcgtcattcagaatttgagatgctaagaaaggagaaatataaatcccgggttaaatgaatttcaaattaacagaacagatgtttagaaaatggtagcattccatatccccttatgaatagtgacacggtaaacggaattgagagacttaaaggtgctcgtaacaaatgttcaaaaaagcaaaaaaaaatactccattgtacgagttttgtttatttacttcaagtcgatgtctacaataaatgaaattaagctaaagtttcgcaatttttgaagtatttagaaatgagctattttcaagtaaacaaacaaacgtaaccagttatacacctcacaagaatggagcgcagtcaaattgtttacaatttttgagttatttttaaaaatttagcttgaaaaaagttgtttgtgtcctttatctcgaagaaataaggtttttgttttgctggtgttgaggttgctatataataacatggtttgggcgacataaattcatcctttaccaacgctcttcgaaacgttaaatttgcatatttatcaagcattttattgcaataaggctaatattattaactttaattgattttaaccttcagtatttgcttattgttatacaatatacagtgattacccctttttctaaaaagctgtactttcgcatcacatctgatacctgcgttcctttcaactttttaatataatcatccaaacgattttaaaatctggttgacattaccgcggagctttaagctctgcattacgatatattttctctttcaccaaagattgctttcttccttaccatttattccttaatcagcttcgttagtatcttttttacaaccaaattaccagtttggtatgttaattcataatggcatctaaaatgcctgaagggtctccccctactagtcgttctattcaatctcgaaattccagttactctacctcttccaacgaacgtattggaacaccctctacgatttccctatctgaaaattcagatctttctaaattacaaagtactaatgattttgagtcgcgagaagatctctctcttacttccgatgacaataatgaccccgaatatgttatgtgctacaacactgtttatcaccaaaagacaaaaataaatgataaacttttatccgaaactgagcagttacgtaaaatttatcctttagaatcccgtgtatttccaaaacctaccattgttaaagagattaccaacgagcgaaccaagcgctacactttttatgacgatgatgctcctcttactaaccaacatactgttttagatgaagcaacttataatcgaattttaaaaaggatagactttttcattgaaaaagtcgttgaagtcccacctacttaccattttttatcgctattaaacgttcaattacgtattcaaccaatttggtggatggatgaatttgctgaaagaaatggtattgaaagtttactgtctgctttaagaaacctgggtcactatcctgaacgtgcatctaaaacacctcttgaatcccaaataatacagtcattatttcactgtttgaacagcgaaaactgccgtcgtcgttatcagtcttcagctaaatgctctgttccaggatttaatgctctaggtactattgctgagactgtgctttcaaaaagtttaaattcagctcgcatggctacttttctccttaaattcctttgtaataaaaaggggttgagttacttcaaagctgtaatcagggctttcgaatggctcgtcgagcaaaagttatcaaaaactcggtttagcgcatggatgcattcctttaatgatgtgattactggtgtccgagtttgtgctgattcatctcctcaagcgattgttcacatggacgaatttgaagatacggactgcttgattgattaccttgttgcaactttagctctcattcgagatttatgtgctgctccaccggatttgcaacttaggtgtgctctaaggcatgaattgttatctgctggtcttcaaaaggccatcgactctttgttaaaatggagaaacagacacgtccgtgatgctctgcaattactaatcaaagagcataatgcagatgctcggcgtttccgaagtggtagtgatgtgaataatgtagataggaaatgcgtaaagaaacagatgaactatagagaagaatcacatacacctcatggaaatactactcgaaagacctctactcctgtatctaataatcgacccacaactccggaacaacaggctgtttgggatgtttttcaaagaatttatactcgctttacgggaagtgaggggtctaaagaaagtttcattaaactactcgagtattttgtgactgaacccgacaacggaaaaattcaaaaaagtatgcagttattgactcacacgcttgaggcactggaaggtttcaaaactgccaaagcagatactaatgtcggtctaacgatcctatctcaaagacttttagacaaacttggtaccgcagaggagattgcagagtacaagacaaagtataatggagccatgcttgaaaacaagcatctgaaagaacaagttgaatctatgctttcccaattgaacgttgggccccgcgaccctatgcagtttctgaagaaacaattggatgaattgaaagctgaattaaatcttagagacaatctcctcgcatccatgcagcgcgaatttgaaacgcgttatagagctcaaattcaagcatacaataagttgcaatcccaaatggaacacgtgcagaattcaaatgagcagcacttacaaccgggcttacttaataaggtttcaaaaagttttgacagtgttcatagaagaaacctttctcaagattctctagatgcgatgaccgaacagttttcttatcatgttgagccaaatattttaagtggaagtggaattcctgttcgtgtacatacaccatccaaaactgaagatttggacgaatctttctccggaagtgaaatatcttcctcgccttcgccattgctaccagatgtttccgacaccgtagaagagcagcaaaagttattacttaaatctcctcccccaccacctcctgctgtaatagttccaacaccagctccagctcctattccagttcctcctccagctcctattatgggtggacctccaccacctcctcctccacctggtgtagcaggagccggacctccacctccaccacctccaccccctgctgtttctgctggtggaagccgatattatgctccagcaccgcaggcggagccagagcctaagattgacgaaaccagcttaacagaagaacaaaagattcaacttgaagaggccagaaaacagcgtaaagctgctgatgatgcagcgagagcagccatagaaaagtatacaagtatccctagtcttcgtgatcttcacaagccaactcgtcctttgaagcgcgtccattggcaacgggttgatccactgcctggaccaaatgttttcacaaagttctgcttaaattttgacattaccgctaaagtttttatagataatgggcttctcgattttttggatgagaaatttgataacactcctagggaagattttgttgcagtggaaatttctgaccaacgatcttctcttttacctgatacagttgaacaaaatatggctattattttgcggtctgtatctaatatgccagtggaggacttagttcaaaagtttttagtcgaacccgactttttaccggcctcaattttatactttgaccgcgctagccttgcatctaccaatgcctataccgatccattcattccttatagtacggattacacaaagaaaaatccaaaagaaccaacggcggatgtgaacagtttatcttattttgagaaattttttgtattgttcgtcgttaaccttcggcactatttccaagaaaggatgaaagctctaaaatttcgctcgacgttgtttggtgatttggaaatacttgaagttcgtatgaaagaagtcattgacacttcggacagtattatggaggataaaaattttgctgaattctttcaagtcttactgattattggcaactattttaatgaaccttatgatcgagcatctgcattttccttgtatatgatatatcgccttgaaactttacgagatagttcctcagctctaactttgatgcactactttgatgagattatacgaactcgtttccctgaattattgcaggcggaatccacgtttaaaaaaattcagagtgtttccggatacaatatagatgctatggttgcgggtgtagatggtgcttatgatgaattctgcgactttcaaacgtctctcaaagacggtgctctatcgaaatgcgaccagcatcatccagatgataaggcgtacgatattctttccgaatggttgcctgaggctaaagaaaggattaggaatattaaaaagcttaaaactgatatgctcactaaacttgaaaacactgtgaagtatctttgtgaatatgactccattgataaggttagaaactctttcttcaaaaacctgaattctttttatgaaatgtattccatcgccaaagcagagaatgaggaacgttttgagaaggagaaaagacgaatcatgtcggaggatcgtgacaaactgattcgtggtcgccaaaagacatccattgtagcaaaatacagaaataaaagagagttaccagaagactctgatgataaacaagatacggcctccaaggataaaaattccttagaaacaattgatgaaaaaatggaagatgccagtaaaatagaaggtgatgctaagaccggagatgataacgaaatggaagatcttgataaaatggaagaccttgaaaaaccagattatgctgaagaaaaagatccatatataactgtaatgtcagaattacgatctcgtatacaaaatgtccctaaaaggactgttactgtttattccgatgaaggcgttgctacacttgagcccggagctcaaggggatgatgttgtagataaggccaaaatgattcttgaaaaaatggaaggacattcccaactattaacttcttcggcaaatcctgatgaggaggttttacgtgccaaactgaaagctgctgagcgtttgcaaaaacctgcaattcctagaacacgccgtaaaggccacactgaaccaaagagtgctaagtcactacttgcagaactaactaacgggtctaatgcttcaaatctagttgaaaatgaccgccaaaaacaatagttgctccattgttctttctaggatggatttttagaacagtatatctgtacattacatacattgacgatttgtctgaaagaagttaaaaatttgtgtgcctgtattttttgaagctgcttcaaaatatattggtgacacagttatctgtattattacgcataccgcttgtcgttaaaaaggctaaatttccaaaaaactgacagcaaatacaatcacttgtttttccaagtgcttagaagtactgaacttacgttgcaaaacgttgttcatttttgactatccttttttgctaaatgtcagcatttttatttgaaaagagacatgttgggataacgattcattaaggggagctttttattacttaacttcatttttatgaagctaacagagaacaaatttggataagcgtcgcaccaattgtaaaaggaatgcccaatcgctttatttagatcgactaaaatgttgatgtttgtttgaaatctccaccaaaaattttattctattgtcatctttatttattaatcttttttaatcattcgtttaaacagtccttgttgtttaattatttattgctcctattttcaactgttgacctagcttttgaaatataggatgaagcgttagtttcctgtataaaacttgaaataaatgcaattatgttttaaattttgtaagtatctagtttacgacattgtaaattagaaaatcttgtttgttttctatgtgctgtcaattcgtttccttaattttttcccttcttatataaacgaccgagtcaagaagcaatttgtatttacaacattaaactgaaagcctgtaaacaacttttttaattcatacaattcataccaaattggagtacaaacctgtgacctctcatccaagtaacatacatattagaaggaaaggaatgcaatacatagagctaactagtgccagcaagaagaggcatttgcgatgtttcagtatgaggctttacatgtaggctgtaatcgtataccaactgcagcaacatggtcttctaatcttggccttatttatggagctgaaagattaatagcagttgctgatccagtaagtattttttgttgtaaaactaagtgttatttgcttatgggttaatcctccaaatcacgaattaaccaataattagttcaaagaaatcaattacttgatggcggggcatagtggaagaatcaattgcgtttgtgagctagctactaatagcgaatatagaagcccttttatactctctggtgcttcggataagactcttcggctatggcaattggaagaagagtatttcacgtgtattaagaccattgagcttgaagcaaccgtaaactgcttgtgtgtaaacgaaaatttagtagtttgcggctgctcgaacagctcttgtattgtgtatagctggaatgcagagcagagaaatttaacagaaattagtagatttacttgttctgagattataccccttgaattcgctattgtgaaactagaccacggtatcattcttacggtttgtggttctagtaagaagataatggtgtatggctcggattcagctattagtagcttcaagctgaaagccgttttacgtggtcatcttgactgggtccgaacgctttcctttaaaaaaacatctggttcaacggcgacacttgcatctggaagtcaagatcgttatatacgtttatggaatatttcactttggggaagtgaggacgaaaaggtttcagaagaattctttgaatctgttttgtctaataaaccagtccgttttacgttaggtaaaatagatctaaagattgtatttgatgctctattaatgggtcatgaggattgggtgatgagtgttgattggcaccccacgaaggaaatgattttgtcctcgtccgctgactcatcaatgattgtttgggagcctgatactaatactgggatttgggtggtgactggtaggatgggtgagatggcttcttctcacggatctactacagcaactggtagtgctggagggttttggggaggtttgtggaacccaaatggtaattgtgtagtatgctggggaagaactggtggatggagactctggaagcaagatgctgggcaatggctccaacttccatctatttctggtcacacaaagtcagtgaaaggcgttgcttgggatcctgaaggtaaattctatttatccgccggcacagatcaaactactagattgtttgcacgttttaaaaaggataatgcttggcatgaaatggctcgacctcagatccatggctatgacttaacctctatatcctgtatgccttctcgaattggatttttgagctgtgccgatgaaaaggtgtctcgtgtttttaaattccctaaaacaattgttagacttctttaccgtttatgcgataccaatattggggaggaaagcttacctgatgctgcaaatgttcctttactaggtctttctaataaagctaccactgcatctgaaactggtacggtaaatgcagaagaagttcagactcctgttgctgatgtgattggttctttgaaccatcctccttttgaagaacacttacagcgtttgctattgtttccggaagttgaaaaattattcggccatggttatgaggtttatgcatgcgccatatctaataatggtaatattgccgcgacttcttgtaaatcacaaacccccgaacatgctgtcattcggttatacgaaacgcagtcatggaatcagcagcaagtccttaaaggtcattctttgacggttacaactataaagttttcacctgatgaccgatacattttaagtgctgggcgggatcggttggtgtgtttgcatgagcaagccgaaaatttattggattataataactttgcttctataaaagcgcattctcgtattatttgggatgctagttgggctcccaaagaaatgggttacttttttgcgactgcttcgcgtgataaattcgtgagtaattttttatttgatcaaatcttgctaactatttaggttaaattttggaaaatcaatgacaataaaaaaatatgtgatgttgctgctctccaattttctgatgctgttaccgctgttgactttgctccgttctttcacaacgatgaactcttgcttgcggtaggaactgaagctggtaaaatatttatttggagatgcccgagagagaatcttaccaaatggtacccaacacgtttaccagaccacatggctcctatggagtcaattaaccaaattttatggaagcccacttttgaaactatggggttgtattctcttttaattgctggcgaagataccagtgtacgacttttgaacgttacgttgggataaacttgaaaataagtacaattggtaatgttagattgggttggcctgttttaaacatacctgaggggtggttaaaaatgcttagataaattatttattgttataattgtcgataaataaaaggaaggttaatgggttgttaggttggcataattagtgctgaatggtagacattcatcagattgattcattactttagttgttatatatatatataaatatgtatttttaattattagtatcaaaaactttggtgtagtagtcttctcaattaactcaaacacaattttacatgttagagaaaaaaacaacacataaaaattttttttaaaaataaattatatttaaaaggtagataaggcaagattttaactaagaagtattttcaagcgtaatagaatgcaagttgtaaatctaactaagaacattgattacttctacgaaatttagtttattttttttccctttctattactcgtttacatttattgaaagaacggagcaagctaggaagtaatttatattcaactgaatgactgcattttcggtagtgtccaaaagtaacacttaccaactccaaacatctattttgcaaacctaagtcttaataaagatactttttattaaaggctatattttctcaggtttgaatttgttgactcaacgagttaatacttatatactccggccttgctaaatcgatattctgtaaagtttgacagtgttgtatttgcctacaggcttaacgagtaattacttattatttattcaaaaaagggagaaaaggtactaagtacaacttttgagttttagaattggagttttgggagagcatttgctgtttatttatcttatacgctcctttaatttttggcaccccggaggaacatgagccaagatcaagaagaagactactccaaacttcctctagaatcaagaatagtacataaagtatggaaagtgcgtctatctgcttatgaagagtgcagcaaatcgttttcactttcagcagatggttcggataattgctttgagctttggaataatcagagtgaattgtggaaatcagtgctgactgatagcaacgtagcagctcaagaagctggtaccgcagcgtttgtagcttattgcaggttttccgatccttctcatttacttaaagctcgtgaaatatcagtcctttcaatttcagagaaatgcttaacatcacctcgcgcaggtacaagggaaaatgcactagaagctcttatgctattagttgaagcagattcagctgcgccagttatagaatcaatcattccttctttatcggctcgatccccgaaggtaatagcttctaatgtcgctgccattgctagtctagttgagcagtttggtgctaaagttattccttcaaaaatgattattccacatatctccaacttgtttggtcatgctgataaaaatgttcgtaaggaagcatctcgtttaactgtaaacatttatcggtggacaggggatcctttaaaagatttactatttaaagatctaagaccagttcagacgaaagagcttgagtctctttttgctgagctaccaacagagcctcccaaacaaactcgttttttgaaaagtcagcaacctacatcagagccgaatgttgaaacacaggtagaagagcaacctgctctcgagaatgaagaaagtgaaccagaaccgtcagatgatcaatttgatttggtagaagaagtggacgttttacccaatgtggatcctaacctggaaactttaatggcttcttcgaaatggaaggatcgtaaggaagcgttagacaaactacttcctgtcttatctcaaccaaagatcaaagacaacgatttttttaatttagttgctattctcacaaagtctgtttcaaaagacgcaaatatcatggtggttataaatgctgcacactgtatacaagcgatggctaaaggtttacgctcaaatttttcgaagtatgcctcaacatctattaatgcactgttggaacgatccaaagagaaaaaggctaatgtaatcgaatcactatcttctgcgatggatgctgttttggctacatccagtttggatgacttagccgagctcattgctagctttgccgggaacaaaaatcctcaaatcaaaagctcctgctttagtttgttctcgagatctttcagtaatatgacatccttaccatctaagtttacagttgatacctgtgctaaagcatgcgttcctggtgtttctgatacctttgagccggtgcgtagtgcggcagcagaagccttgggtgttttgatgaaactcgttggtgaaagagccattaatcagtatttaagtccgttggacgacatcaggaaatctaaaattcgttctttttatgaaacagctacagtaaaggctaaggcacctacaaaaaagtcgaaagttaaaccttcaaaacaagaagaatcaaaagtcgtcgtaccttcaaatgctaaggctgtcaagaaatccgttgttccttctagtccagttgtaccatctccacgaaaggcaactaacaaatcgctttccatggatgtatcaaagggtaatgcatttgagaatggtcctttgttaccaagaccgactacgaggccagtttctcgagggctttcacgaggcacatcttccagtttgcaacaaaaagtaaaagcttccactcctttgaattcgggagcacttaacgaaacggtgcaaaatttgaagaacatggagttggacgatccggctcctcaaccggctaagcattcacgagttgatcgttatgaacaccctaaagtattagaagacaatgactctaccatttcgtctttagaatctctgaagagagaaaacgaggagttacgagagcagttgaaagttgaacatgaagagaatatttctatgcaaaaacaactcagtgaattgaaaggtgaattaaataccttacgcagtgccaggaaagcctcaccaataggagacagaaaacctgcatttatgcgaagagctaatactgactttttagagctctctacgagtccctcatttcaacgttcagtgagggaatttgaacctactagacctaaactttatagctctatagatgtgaatcagagatcccctttagcatctgcgaaaacaaatggtaatttcacgtttcatgctgaattaccaagatcaccgttttcgtcaagggccaataatatcaatcctgattggactaaagccattgatttagctgccaaactaaaacaaaaaattactgagatgaaacaaacagaccaaagacatcagggattgattcactagtttttaaattctttcgtttacattccaatgtcccttacttccctttctattttttaatgttttagaataatgataatatcggtttacaaaaataataacaaaatacgtattctcgtttataccaaatttcttaaaatcagatttaactataggttaaagatggagtcaaatggtaactcaaacacacaacacaaacaaacatataaaataaataaaagaattttaacgtacgaatttatcgcattaaacgtattagtgtcattaaaaaaagtagtctgtttaattttgcatcacaagtatactgtatagccgtaccaagtataaacgaaaacctctttttaaaaaaattaaacataataaagaaattgttagaagaaaaaaaataaagatatgcgtaaagtacagacagtcgaaaaaagagtaacaatcacatgagtctttgcccaatgaaaagttctaagctttgttcaaaaagtccggaggactgatgttgctaaagtagtccaaagaagcggtggaaggagtatcggcatcaccatcatcgtcctccaggtagaaataagaatcacgataaggggaataaggcggtaaatgggacaattccgactctaatttcctatgaaacagatatataggaagcttaaaatccaaggaatctagccactcatttagttttttcgcattttttcgagagtatttagataaatttggtagggaggcttcggaaggagaggctaaagattgctttacgctgttttcagtatcgccatgccagcttccagaaagcgaagaagatgatgatgagggtcttttcatagaaaatagtgaattagatttagctttgtgagtccgaaggaatgggggagcgagttttcgggataaagaggagggttcacgagagtgaattgatacataaattgaatgtcgcacaaggaggtgtggattttctgtacagcttccgtgaattaagtcgttcacaggaattgtgaactcaactcttgaatggaggccaggaacaataggtggagaccacttaccatcctcaaaaaggacagtaatggagtttcgaaaagcatcattaaaaagaaaaaaggtaatgctttggacaagaagcactcgtatataatagcgttttaacttcttttcgactacaggagacgaggtacgagataatgaagagcgtcctttcatatcacaatcattactcaaacgtggtaaccgatcttgaaagataaattgagaatcttgggagttaatagcaatgggatctatatggggatcatctgttccagcagaacctggggtagatgacagtacatctgcatcttcggactccaaatcaattaaaagtgggcaaacacagcctggtcctttatagcactgttgaggatatttaaagaacgcagttagaaatgaatactttgaagacttcattgatagcgaagtaaaacacgcatcgtttaggggcgctccataacgtatgtgctgagattcaggaattcgatcgggattgagagtaaaaggtacaactacaggaacattggctgactttggcatacgacaatcatcttcagtatacaatttaaccgttaatttgtaagaaatcgaaccttcttgagtcacaatcgttcgtggggtgcacctaggaagtggagcaatgatatcaaacgtatagaaaactccttcctttactttgaaattatttccaagatcccagtcgatatgattgaaatgacactccagcggtaactgtctctcagtaggaaactttttcagaccagtaaagcttgcagtaaggtatttacaataaaatgtatcagttgtcacaaagtacaccttgtatttaaggatagaacaaggatgctgaacttcttgaaaggtgtcagaaaccgctcctaaaatatgtattttgtctctcgaattgtccatgtaaattaagggcagagacaatcaagggcaccaaaaaagagacatttcaacgtcaagcttaaccttacaatcctttaacaaagaattgaaaagaatacttggcaatttatagttttcgtaaattaaatggaggagatgttgtacgagatatgtcatttaaatgagagggtcataacaatgaaataacgaagcttcagtataattagttctatcgttatcattcaccatatgagcggcgttagctatcattatacaatgagtgctctttagtaacgttgggcatgagactgatactcacaatatgacatgcaagttaatcctttattccaaaataaaacttaataaaaagcatgaagcccaaatgaactctcattcttccattaggtcgataaaagttattattatatttataatggtatactctatagccctagtcatactaaggatagcaaagtaatattacctccattatattatacattacaaagaaatgccgacacagtttttcgtatccttacagagagtgcaaaagacatactaattactgttgctaagctccatatttctgatactgaggcacaacgaagttttcacttaactttaatgaaatttatcatctcgtaaaatggaatgtaaatacaggtgaacgggtaaggaagtattagcttttcagttgtttgagtaaaaaaataattttcaaatacatgaattatgttggtaaataaacaatcttattcagcacctcctaaagcaagtagacgcggagttaaatgatcccttttttatgttaaatgtcagtaaggcaataaaatattaaaagaaaatttatcgtgtccgtcctgtattgagttgaaaaattaagatcataaactgttccaaaataataatctttttttaggtataacctgcctcatttgaacaataaaagtgatttgtaccatttatgctctttcaaggaaatagagaaggggagctaaacaccgttgcctgcaatcagagtacgaatacattgatgtatttcactttcgtagtttaaccccgacgaagattccaatcgctcatgtaatgaggcatcaagacatctttttagcatttttaataaaataacgactttaggccacgctttaatgcaatatgcttgatcaagtattaatcccttaccaagaggatcaatgagtatatcatttgctcccagcaaaatcattccatatgtattgataggtgtacaatttctaaggaaaggtttcgtggtttctaccttttgctcatatgccacgaacgtacatcttgaagcatttggagaattaacaaacatagtacttgaaggatgtatgaataacctttggttgttttgatcataaaacttcgtcaggcgagcttcctgctccatttcaagcgatccagaaaatgaagcaacaaattttttatcaggataaacacatttcacaacattgggacttaaagcagcagcaattagagtcgatagaacagtcaggttttcagttgaataccaatcaaagttaccagtcagctttttagtagttagttcaagtagctgtgcagcttcgctcaattcgtttcgattctgtcgaatttgttgtaacgttgtgtaatgaagatgcatctcttcacaccactgaactgttttctttacacccctggtttctagtatttcgagccagttgtgatatactcgagcatcagccaaaacatctccccatccttgactttgtttactccttatttccctagcttcatcgtctcctaagaaaggagactttgtagagagaatagctgtaatagtaagcgcaggttccaaatatccaaagatcgaaccaaacaccaaaagctttccaagctttagatctatgggtaatgacacctaaaattatattagtttcacataaaaacacatcattacttactaagtattctcctaaaccagttaaatcttctgacacggtgagagcaccgacttgaattagttttttcaaagcaaggtctaccgttgcatcattcggtggatcaataaggctgttcataaattttttgattgaaccctggttcacagaattaccagcagaagaaaatctcttgaccaaaggaactacgttaagacaaacctgacttaaagccgtccgtaaaacttcgggaggtgtttggcctagcattcctttttcttcaaatcctcttgtatataacttataacatattcctttcttaacacgacccgcccgaccccggcgttgttgacaagcagctcttgaggcccaagtctctttaaaagtcaccagatctcgttcaacatcataatcaatttgcttaactctgccgctgtcaataacggcaacaacatcatcaatagtaattgaagtctccgcaatatttgttgcacatatgatcttccgctttgtgtatgttttgaaacatctcctttgctccgaagtattcaaagaggcatgtaatgggaggacctcaaattttgagccgtcttttgattttatttcacgaatacaacgagctatgtttgagacaccgggaaggaaaaccaatatagaaccactagaggaaccaagttcagcatcaatagaactaacaagtctagaaataagatgataatcaatttcatattcttttttctttcttctgggaacgtcttcctcgtcatcatcttcatttagcttaggcgcaaaatcctcaatgtagtaatccttgatcggaaaagtacggccgtgaatatgtaaatgaccagcatttccaaaataatatttgaatgtatcggagttcaccgtggcactcatcaaaatgactttcaaatttgggatacgagaaattactagtttcaaaagtgttaagagtatatcattttcgatggatctttcatgtacttcatctacaacaacacaagataaagtactcaaaaagcctagaccatgttgctgaattcttctaagaagcaaacctgtagtgcaaaactcaagaagggtttctttagatatggatttttcaccatgtacactgtaaccaacttcttttccaacagttgtatcacgttcgaaggcaactctttccgccaaacttatcgcagatattctccttggctgtgtacaaacaactgtttgcaaatctttttctccagaagaaagataatggtccaagataaattgaactacttgtgttgattttccactaccagtttcaccacttataacaacaacttgagaatgctgtatggcgtccataatttttctccttgattcccatgcagggagtttctcacgttcacgaacttttaattgatatgaaggacttttaaccctctcactccagttattacataatttttcagataattcgcgcgaacggcgaaataattttggcttgaaactgttattctttttggcagtcggcgcagacttgttttgagaggataaagagacaccaattgttgcagctgaaatatttagtaagcttccaatattttgtaaaaagtcttcaatattttcctgaagatgattatacaaccaggataacatgcattcacctctaagatccattgcgtaaacaaccatctttttaagaatactcaacttaatataggatgccattctttttgtagaggatagagacattaaaggaatgtgtgcaggatacgaacgggcaggccttctaaaatcgacgaaaagctcaccaaattcactagtcgggtagtcaatacgcactctacatccattctctatttttgagaccttattatccaaaatagattgcaaagcactaacatcatcatcccattcggtactatttggttccaaagatatattcccatcaaagctttcaccaattagatgctgctgtaagtactctgaactaatttgaatgttattttcaaaagtttgaagagtagaaaaacataagtcaaagctatagcccgtctccgaaatccctgttaatagttagtgttgaacaaatgtcatacgcacatacgtttagcgttgtagtgaatggccagattcgctgaatttagattctgaacagatattcctgttgtataatcagaaggaagaaatcttgtaggaagatcgtcttctggaacatgaatgattagccactctaaagcatcttcaagggaaacacagtactgacaagcttctttagcatgaatgtctcgaaaacctaaagaaattaaatcattaacaatagaagtatcgggctctaaattttttgtatcctctagtatatcccacgtgttcatattgcgaaaaaggttctctagagagcgacgattttcaagactcatgtgaataggaagagcatatttgaaattgaactttgagaagtgtgaaaggcttgtgtttttgatagatgtcaaagagaccttttcatttttctgagatgcttttggcggtggtttggcagctgaagaagcgcgtgctgcctgtagttctttggctgctttgaagggatcttcattgtaaagccagctgtgcttattttttagctcttccttcttttgtttctccatatcaaaccatatattccgatgttcaggtggaagggcatgttgtaatgatttatgagacattatctgttagaaattaaagttggttaatgattgcttgaaaataaataagtatagatccttactcgatgcaaagcataaacggcgccaacatttcgtgcttccactaacgtttctttttcaggaaagtagccattctcataataggacttgggaggaatcagagatacatggtctaatatcgaagggttttttgggtccttcttagcaagtacgacagaagtaaaaatgtaatttttagatttggtttgcctctgtttagaagattttagtaagtatgtgttcgatagattggttaattcgcatcttttaagagctgacttaccaccttaacatcacttttctcccatttacttctttggcaatgttcatttagtaaaacgacaggaatttttccagtccaagagcttcctcctactaactgtttggcagtaggacgtgaagtcgtttgcaggcctgctgtttcctgtttatttttttcaattggatcaagtgagtttttctttttccctttgatatttttttccttgttttttgaagtttctaaattaacctccgatgattttcccttttttccttttgaacccattcgatggtaatatggttgaacgcaaagaatttttaagccagtgtgctgagttgatgaataattgagaaaactaatttatccaagaaggtaattcttattctaagtcaaagttaattccatcaaatttttggtaaaataaatacatcacacatgaaagaagaaggtatattgcgttattgaaaatcagaaagttgggtgtttgaatttaattattgtgaagcgttgaaagcgtttattgattatatttcttttaggatgtttttgctattgatttaaacatcccccgtacgtgtactacagctgtcaacattggtaataagtacgcagttggacatacgcgtataagagcatttagaaatttttttgatcaggattacctttttcttttgcaattttaacaaatcatggcgcaaacaggaatagtaagaagcattctcaacgtcacttttgagaatatggaattcaattcgcaaagtttcaagacaaaataccggttatataaatccacagcgtttaaagaatgatcgatcattgagacgtatgagtgtttcagatgatgatgagtttcctgtcttcgagcaaatccttaaagagaccttactttttctggctcacttataaacagacttacatcttcgtttgaattgaataatattcattagcactagcaaaggttcataatttatggagcaatgttgacctggggattttgacaattcgctaaattctccacaggatcaaaggattaaagcgtttacttcaaatctgtactgtataaactggggaaatatccgtgcaagcgtcttaagggctgaaaatttaagaggtattttttaccatatatggttgactagtctcccaactagatcctaattactataatttccctttaagtttataaaataaaaagctaaaaatcctttacaaatttcttccagcgtatcattcaggttttctcgctacctaataaactatgtaataatgtaagagatttcctaggtttttttgcgaatattgcctgagactacacttttatggtaaatagcaaagaatccttataaacatgcttcttattgtttaatttttcttaattcaacctcttaggttcagacttaaattgcctcctgttggccctaacacttgcacatatatattaatttttcactatgccatttgacctctacagctaactgcaaaagtcgcttgtccatttaaaattgggtaaataatcggtcaattcttttaaaaaaaaattttaaataaagagaataattgtaataactctttcaaggattattttacttttgaaattacattttttgctggttgcgcactttttctgcatcatttattgaagactcatctaatcttaacaagaataatttgataatggctaggggaaagcgttcaactcaacgtgatgctgatttggagcttgaaagcttacaaagtgagattgagagtgaaagccctcaacctgtaactaaatccaaagcaaagaagaacaaaaagaaactgaataaagcaagtgctttcaatagtgataacgactccaattatgatctgaagccggaagacgatgaagtagatgaggaagttgttcctgtgaaaaaaaagccttctaaaaaatctaaaaaggccaaggctaatgcttttgaagcttttgctgatgaacaaagcgttgaagaagaggaagaagaggactccgaaaagccagttcgcaagaataaaaaatctagcaaaaaggctagtcctaagaatgcatttgatgcacttgctgacgacatggacgatctctctctagatgaggaagagagtgagtcatctgaaaaatcaaagaagaagaaaaagaagtcaaaatctaaggatgatgggagtgaagctttggatgatggagatattgaatcatctgaaaaggataagaaaaagaaaaagaaatctaaagagaacgatgatgctcctaaaaaagatagaaagactcgcaaaaaagaggaaaaggctcgtaaactcgctagtatgttggaaagcgaaaacaaggacaacgacgcaaatgctgctcctttgaataaaaccgacgcgtttaaagatggtcttccaagtggccgccttatttttgcatacgcttctggtcaaaaagtcgcccctgatggtagtaaccctgcagatggtattacagtcaccgggaacttattaagtcctccaaatagtcgtgacctacaggttgaaaaactttccgtttctgcatggggaaagcttctaattaaagattcagagttgaatttaattaatggtcgccgttacggcttaattgcgccgaatggtagtggtaagtccacgttacttcatgcaattgcttgtggcttgatccctactccttcctctttggacttttatttattggaccgtgaatatattcccaacgaacttacttgcgttgaagcagttttggatatcaatgaacaagagcgtaaacatttggaagcaatgatggaggacttgcttgatgatcctgataaaaatgctgtagaattagatactattcaaacacgcttaacggaccttgaaacagagaatagtgatcatcgtgtatataaaattctccgtggtcttcaattcactgacgaaatgattgccaaacgcaccaacgaactaagtggtggttggagaatgcgtattgccttggctcgtattttgtttattaagcccactctgatgatgcttgatgaacctacaaaccacttggacttggaagctgttgcatggttagaagaatatttaacacatgagatggagggacatactttacttatcacatgtcatactcaagacacacttaatgaagtttgtactgatattatccatctttatcatcaaaaactcgattactactcaggcaattacgatacattccttaaagtacgtgctgaacgcgatgttcagctcgctaagaaagcccgtcaacaagaaaaggatatggctaaacttcagaacaaattgaacatgaccggtagtgagcaacaaaagaaggctaaggcgaaggtaaaggccatgaacaaaaagttagaaaaggataaacaatctggcaaagttttggatgaagaaatcattcaagaaaagcaactggtgatacggtttgaagattgcggtgggggtataccttcccctgctatcaaattccaagacgtttccttcaattatccaggtggtccaacgattttctctaaactaaattttggcctggatttgaaatcaagagttgccttggtaggtcccaatggtgctggaaagactacgttaattaaattaatcttggaaaaggttcaaccaagtactggtagcgttgtacgccatcatggtttgcgtttagcccttttcaaccaacacatgggtgatcaacttgatatgcgactttctgcagtcgaatggttgcgtacaaaatttggcaataaacctgaaggagagatgcgcagaatcgttggtcgttacggattaacgggcaaaagccaagtcattcctatgggtcaattatctgatggacaacgtcgtcgcgtactttttgcttttcttggaatgacacaaccccatatcttattgctcgacgaacctactaatgccctggacattgacactatcgatgcccttgctgatgctctgaacaacttcgatggtggtgtcgttttcattactcacgacttccgtttaattgatcaagttgctgaggaaatctggatagtacaaaacggtacagtgaaagaatttgatggagaaattcgtgattataaaatgatgctgaaacaacaaattgctaaggaaagagaagaagagcgtcgaattgaattggagaagcaaaaaaaataggaagtgtcgtgtttgggttggtatagataaatttaaaattgcttcattgtacatttacggcatccccgtcatctctatattgttgcttttcaaaaactttttttttaaatagtttttttgaagagtttaggtctccgtaattgatttgttttttttttaattacattgtttaagttgaaaaattctgtaatagttaagcaataaatagtagtatttttacaaaaaccctaataccataaaaccaccataactcatgatctgattaaaatcttaacaatttaaatatcagacgaacaattagtgcaattttttacttttgatccttctatccctgaattcctatatgtggtcgtgaaccggtgtgatctgaagctacaaccaacactaaaaaattctgagaagatgaagttcagtcaatggtacacgttgactgcacctttgttgatcagttcattgtatacagtaaatgctgcaaatgacctccgtggtgtagcaagtgatagtaagtttgaattgagattacaatagaaagcattactcattacttgtagaatcggacttgtacaagccagatgccaaaggaaactggaaatgcttgggaagtgataagttaatatcatttaatcaagtcaatggtaggattattgagaattaaaatctgaagtgccaatctaaacctaacacattttagacgattattgtgattgccctgacgggtcagatgaaccaggtaataagcttttactatttatttgctaatccacttaggtacatctgcttgtcacaatggtaaatttttttgtaaaaatacaggatacatcagttcatatatcccatcaaatcgtgttgacgataccgtgtgtgattgctgtgacggttctgatgaaagtcttattaaatgccctaatacttgtgcccaaaaggctcgagaatacttggcaacattagaagagcataatagacttgtaaaaaatggactaaaaattcgcgaacaatgggctttagaaagcgcaaaaaaaacagacgaagtaaaggctcgatacaaagaaattagcgatagtttagttgccgtttccgctgagaaaacccaattatctgagaaggtggagaagatgaagcgttcaacggatttaggtgctgaagccgtgttgcccttagattttcaagatttgagggtagcgctactttcacttgtcgatgagcgtaatgaaatgcaagaaagacttgatattttgactaatcttctcgatgaactaacacttctatatgaaacggataaatttgatgaaactatgaaagaagcaatactttcttttgaagatcttaaagagcaagaaatcagaagaaaggtgagctccgatgatgttcataactatctcgagtcatgtaacaaccacctttcaatgctaacagggccttctgaaggtatgggaaacataattattgtattatttagtcacagaaaaagtagaaaatttgattttttcctttttctttttattatttagctgcgtggtcaaatgtttcaactttaactgactttgagaattagatattactttttcttctttgatcaaggacatcaaaaaaattttaaattcactcgtttggaacatcaaactctcacttatcaattttggaatattaagtccatctgcctcctcaactcctttgactgacagtgaatcatgtatgttattttcgttgattgttagttgattaccaattactaattcattaagatcgccgttttgaagcagctcaacgtgacctagatgctgctgaagaaaacgaaaagagtcttgaaaaggaacacacaaaacttatgcatgaattggaataccaccatgggtgggatttgtacagagctatcaagggaatggaaacaaaacgtgaaattggtggctatacatacaaggtggtgttttacgaaaatgtttttcaagattccattctattagggtaggtgtagatttgctttggtatgtgtttgctaacaactctagaaattttgcctcgcaggaaggaaatgttctaaagtatgaaaatggtcaaagttgctggaatggtcctcatagatctgccattgttactgttgaatgtggagtagaaaatgagattgttagtgtactggaggctcagaaatgtgagtatttaatcaaaatgaagagccctgctgcgtgctcccctgatcaactcaagcagtctttactcaacacccaaaacagcgcaaacgaaaatgctgttaatggaatggaagacaaggaatcatctgtcgatgagttataatataatatcgcttatgccatttaaataaattactacattcaactcatggtcgtctctacagtaaattacgcctattttttttaagcattttgaaaatatacaacaacgtttattgaaatatccagaactgatgatgaacttcgattccgttcatatacgtataaacacataaactgttaaaacaatgctgttatcgtcttttaaaaaaccaaataaattttgttggtttctaccaatataaaacccgagaatgatgtaaaacactgctggggtaaagaacgaagcagcatgccatgaataaacaaaataacaatgccagacgtgtagtccaaatattttacactgcaacttaagtaacgagcgatgagtgaaaatgaaaagactttccagagtccataaatcacaatcggaccgttcaaacgggaaatatgctaaaaaggtaaacgtttcaaaggtgatatctaaccggccatatcactgcagcatttgaaaataaatacatttgcagcaactcaaatattaagtaagggtagatggggaaacggaaaggtgtagacagggattgtaataacgatcgcagagaattttgcaagagatggatgaaaggaaatgaaaatgaataagaataacgtggataaagggtgaaaaaggtaaaattgtacaaactatacaagtccaaggaagaaaggtttaaaagaaaagaaacagaaaaaaaaggggtaagcaaaaggattatggttagaacagtcaagatactagaagaataaaagaatatcattaaaaccaagtaatgaaaaacatgattttttaaaagaaaaaaacttttcatgcaacaaggaagaatgaccgttgatcaatgtctattgccaagaacaggaatcaaaacaccacataaaacagcaacgattacacaaatgataacaacacaaataccaaagcaaatccactttttcttacgagctgctctagcgctcttgatagctctatccatatgctgagttccttcacccatattcgtgcgaacgttaacagcatccgttacaattttatccaccattggttcttgctcctgtaccatagtagccatatcctggaaaagctgtgcaagttcagcaatggttctttcaattcttttaatatcggcatgacgctcctggacttcccgtaatgcagtgcgagcttcaccagaccgatttgatcgaagcaaagcctgagcaaatacttgtccaccattttcttcatttatagcggtttgaaaatcatcttcagtagccctggggttggcaatttcaagctgccgacgcatacgttgttcatattgagcacgatatgtcttttctatttgtaaaaagtgacgaatttggtccataaatttcttttttacagcttcggtctgtgtttttctggtggctgtgtcattatcgggtggcagctgcatattttgagactctaatgaccggatggccaactgaacgctagtttggagacgtcgagtatctgatgtgtaaccttctaaatggcgagtcgtagctgcaatatttgcttcgtcaatttcttgcagcgattgttgatgcaacatctcaattcgaccgacattatcttcgatttgacgaatggcatcgcgaatatgatcgatctcttcaaaaaactctcccatactaagagggatcatctccactcctagtgtataatcgtttgctttattcattttgttatatttatctgtttaaacccgttttgttgaacaaacaaggtatagataccttctgttgttgttggttaaagacaagaacgtttttcctactaaaaataaagaatcatacagcagcatttaacgaatgttttcgcagacaatggtaaacaaaaggcggcttagcaacaacacactgttgaaagtccgccaatcataatcaaatccgagctttgtgtgacgtagcagtgtttactttttaatgttgtacaatacaatccgttaaacttgatatcaaaaatatacgcctaatacttaaaaattgaattccaaggaagttggagtttgttaaaatcacaataggatactctcctcgttatttggacttgtatgaggtacgaataaggagtgaagttttcttgatattctggttgaaaagaaagatttttgctgtagtttatttcaagaaatgcataaaaaatatttaattgtttttcgtagttgatggagttgactgtctcggaattaatcgttcttttttgtttttgttttttaacactaaaagcaatcatggtttgaatgccattggaaacgagaaaggaatgctgaaaattttagttatcattgtcggtaatttttctctgatctatacttctaggtttgaatttgaaacagaagtaatcgatatcctaagtgattttctttgagtaattaaaaagatagtaactatatacctcaatataggtagaaatattttgacattaatgaataaattaaaatagaaattgtagcccctccaatccctaagctgttatggttgaaaagcaattcgcatcatgtaacattacaacgttgctaatggaataaaacaaaagtcctgaacagaaatttcaaatattttactaaagttttaaaggtttagtaaatggaacaatattttgatgggaccaggtcataatgtatggtatcgtagatttaaaaaatacacaaaatttgatgacttcaatgcaaaacattaaactcagagattggatgcaccaaagaagaaaagagactatacacatattttgtagttttagagggggatggcaaaaaggtatgaagcatgtgtgtatacggaagctcaattaccaatcctttctggacttcgtataaagtatataatagtccggatgaattacttttcctgatctaaattttttctcttggggagatgactcatgaggtacaaaatcaaaatgatgatagaaattcaaggcgtttaaattggcgctaaatactgtcaggaaaatatattttaggtttcgtcgatatgcaagtatacttgcattttttaataaccatttcccaacgttcctccctcgtatatgctcatctagctgtatctcatatatgtataaacaagtcagacctgcttccacagtgtcttcaaaactcagaaatcctaccaattttttcgaggttttttcaaaaatacaaatatactctaatttttccatctccatttccttcaatttctctgaatcatcccatccgaaggagctttgtcgatatagtgcttccatgttcttttttaccaaattgaaacattgctgaagaagtcctttttctagatgatgatatatctccacccaaacccctaagttttttaaaaaatcaacgtcttcgagtgtaacattcttgatttcctgggtcttcatacgtctgggtgagtaaaagaggtattgcttcaaaaaatgcataatgttgttaaggtatcaatatcacattacacttttaaaaaccaaagattgaataagggtttaatacatatcgagcaaaatgctatcatttttattattgttgctacagcaagcctacttagtaatacacgataacaaaaaatgaatattcttaatcatctaataattcctatttccaataatcgttttaagccgtatcctttattcaaataacagcagttgtattaatttagagcttgacttctgatgaaaccggaagagaccttaaacgcaatatgcaactttaaaatatatatatagtttccaaagatagaaagaaacttgcaaacaaaaaaaaacttttacaaacaatttcggggtcattaacgcgtatatttcaattagcatgatttaacttcaaggcattttagcagatagatgatgctctaaaggcatatttgctaaacccactgcttgtggataaaaatttgctacaacttgtaattagcagagcagtaaaagtttttttcatcgttatcaagtttaggtatcctccaacttgacaccagccttcataaatttcattaatcatgtttctgcgttcctgagtcgctttcagaggagagtgcatcccggtcatatcggtgcttttctctgtaactagttcgagattccctccatcttccatctcgagatcttccgaactcatcaaatccttcatcatctcgtgttctataatgtcgttcccgacgtcgagttggtctatatcgatcttcatacctttctttatgagagcgtgaataagagcgaatatcgtacctctcacctcttggcttttctgagaaccgagaatgaggcgacgggcttcgaccatatctgttacgttcagtgtcacttgcatcatgaaaccttttacggtctaaagtagaccgtgatgttcttttcccatttctttctcttgagtcataataagttgactcgcgccttgattctctacgatttgaatgatcagtcacagtcttcgattcttcttttgaagcctcagttcgatcctgttaaatgtcagtaagttttgggaaaaagatcatacttttagttttgatatttcttcctttttctccaaaataaatttttccggaattccatactggttttgcgaggcagagataattaacgaccaaagctcttcggtgaaggccgtggcattgctttccaaaaatcccgttaaattcaattgaacctttctaggatcaagtgttgattcattttgggaatcacttgtttttgaggcttcgactgcttcttccagcatgccgtacacaaaatttataacaacctcgtcctcaaacccaattagttcgttcaatcgagtcgcaatccaaggtttaaggacttcaatattcacttttttcatgtcaacctaaataaattaatgtcttgaacgtaacagcgcctgaaagaatgcagcaaatcttgtaccttagtatcataactagcaggaaactttgtacttcgcatcaacttcttgtctgcagtcgtaaatagggtttcctgctcggcggcaacacccttttaatgttagctttggttaaaatgacacattctttactcaaactacataccttataaaacccactcattttgaccaagaatgaaagaaggcagcaataaacagtcaaatattaagaaatcgtcgtcaacgtattttctcacctccctaaggttagaatatcttcctctattaaataatggtgctaagcggcggttaagtgcaggtgtattatatgctttttaaatcttacaaaagcttagtgctcagctagtgcttcaacagatatttccacacaatacaatcgtagaatttagacatagttgatgcagtcatttacatttcaactaagcagatcatggtataaaaaaagttcggtacttgaaattctagcaaaccgctgctgcaaatacactatcacatggtctacaatatatctacacggattaaaaaattttcaactacacaaatgaaaaatcagtatgtacgacaatcgtcaaaaccagtatttagctacacaaaagacaatgaattttatgattacttcttcttggagacaccgacggtcttaccgcgacgtccagtagtcttagtgtgctgaccacgaacacggaggtcaagagcgtgacgaagaccacggtgagtttgaatcttcttgagacgctcaagatcctcacgaagcttgctgtcaacgttgttggcaagcaattggaaggacttgccatcgtttatatccttttgacggttaaggaaccaggaaggaatcttgaattgagaagggttttgaataatggtaacaatacgctccaattcttcagtggtaagctcaccagcgcgcttcgacatgtcaatatcggccttcttgcaaacaatgttagcgtaacgacgaccaacacccttgatttgggtcatggcgaacatgaccttgaccttgccatcaacgttggtgttgaggagacggagaatgtgttggaactatttaagaattagtaaatgtgacattaatttaccatgttgctagcctttaaacttacattgtcgggaacaaccagagacatgttgagatactggctaatgcgctgtggacaaagttttagctgctcctacggtttgtgttgactttgtgactgctctttggctagtttgttgaattgcgagtatttgtgtatgttggccggctaaatcactttaagaagatgtagtattagtaccttcaaacacactatttcggcatatgtagttactatttgtttacaagcataataaacaaatgcattaaaataatactcactcaacaaatacaccggacgaaaactgtttcttaaaaatcgtccaaaagttagggaccgaaaattttagttctgactatgtgtcgaggtccggtggttaatttatgaatacatagctttaaactacaatctgcatcgatgaataacaagttctaaaagtcatgacaaattcaaagttagccatatgcccatagatgcacttacgcaaagtaactcgctactctagtttatacttctttaaaagcaaaattgacgataatgtaatgacctcctttgtgatcctggttaataagtaaattggagcacccaaattacaatcttttcaataacaaagcatacaaaattgtttgtattaaggattttatgtatcgtttaaaggaatcgcttaacttattaccctcgtccgctaagccctctctacataaagatcaactaactagtcatatcgtggaaaaagagatcgcttgaaaagcgataaagttgctttgtactacatcaaatgtgataaagtaattgaatgtaatataatatttttattgaattccatattcttcgtaacctaaacactcagttatcagtcgctgcttctttttacagattacataaccatagttaaaggggaacaatattagttgtaaacgaaacctattatgagagaaattggtattttttgatgtagtgaataggtgagcaaggtaaaagaatggaatcttcagaaatcgctttactcgagcttgaaatttcctgaaactacaccaatacaaagggtatcggtccagtctggaagataatcattggtcaacttctcgcacagttgaatactagcacgatcacgaccttctgaagcctttgaaggatagtgtcctactccgtcaacgcctacgaaatcaaagtaaattggggcttcaagataactcatattgaaagaataagaatccagtccataagcactcacttcgcgaacatgatgtctacgaacagtagatggaacctcaggcaaagaccaggaaagaacgtcagcatcaaatgaaacgactgtccaaataagtccaggatgttcgactgtaacagtaacattaacaacattatccttaacaactttattggaaaacttaatagatggtaaagtggtcacatcgacagtatcattcaacggaatacgataagatcctagaaattgactgaaagggtatacagtatcccaatcggaattccagtcatccatttcagttttaacaactggttcgtcagtaagaagactagatagatcagatgagagcttgtcaaaaccaggagcagaatcagcagaagcaatgtgcaatgaaacttcgttagaggtgatattttccatacgctggacgaaaatacgtctaggatgcaatgagtcataataggtatcttgcttagctaagatgaatgaactaaagccaacgacaaaaatggagaaaagaaggccaagtcggaagcagcagcgagaacggaacctctggatccaaggggacattaaagggaagtaaatgttaaatccacaaacacagacagtggcaactacattatcggcaaccttgtcagttccaatacgaccagtaaggggcacaaaaatttcaaggagatttatagcagattcaaatccaacagtcatcgcgccaattgaaccgatgaaatacgtcaatgggtggactgtgccgggtttagcgaggattttgtcgttaagaaacaaagcaaagaccataaaaaaatctataattgtaaataaatatgcagaaggcaatgggataaaggtgagtaaagaaaagataaagatcgttgctcttaatgcaagatgttcagaacgcttaaacaaagattcggtaaagaataaagatgcaaaaattgcaggaagataaataaataaaggccaatactcgtttcggaaccagctcataccacaatccagtacatttccaagaatgtatgcccaaatgttgggaattacaaatattcctgcaatggaaataacttgagcgatcaaagcaacagtaaaagatccctcagaaccacgtagagtaagtagaatacccaaccctccaactaaagtattcaaaatcttagacgtgagcttggagtacatgaagaaaagactgttaaaaactgaaaaatacacggtaccagatgacttcatgttgttcaagtctgcttcgggggacacgagataggtaagaatggcaaggatattttcaccgaaattttgaggagtaccaggcgatatataaggagccaaatctttctttgtatggtacaagtaactgtttttaactacggccatatccaagcctgtaaggtttccgtattgaacgaactgacggaaatcggtatcactcaagatcaaacctgtacggaaaacatcatcggccaataccgttccaaatggatggggaacatgagaatatgccttaatcatctcgttgctagtagcctggaaaagaatttcggaaccggtggtaccacaagcctctaagttgactacacacttaattgtgtctctgagtggactttgagtaataaacatgtgggacgcatcttgcaacgactcttcagcatcattgaacaaaaagacaattgaatgagttaatggaacaggtcgagaaataaaaatacgaatggcttcgagaaggattgcaacagcaagagcatcatcagtggcaccaggactaggcagagttgaatcaacgtgagcattgatgagaacggcttcttccttacaagcctcagttccattgctcaaacgaacaacaatgtttttaaggttttgatattttttgataacatacttattcataaagtcaaagcgatgagctccgtcaccggattcgagggaaacctccatttgatggatatcggcgttcgggccgtcctgcaattgcttttgcaaagctaacacctcattcattatgtattcacgagcacgttcctgctcaatagtcccgagaattcgatagccaatgtcgtcggacagatgaataacatgtttgagggcatttgcctcggaaaattgggggttaccattagcatcatagggatcaacaagtggttcatcaagatgattgtgaaagtagagcgcaatccttgccatcacaacggcaaatagtaccattgccagttgtaggaatgtattacgcttacatttagaggatgaagcacaaactaacaccatgttgaaagaaggcgcaaagtaaatattttacaagaatagagggggagaattgacaagataacacaccaataataataaaaaattatataataaaaataaatgataatccaaaagatttaaatactaatatatacctctctcgaaggaagaaccccgataaagtaagtaggcaaagggagcagcaagaaatctaaaaaaaaaaaatgttagttacatacataactggcagttttcttttattatattgtcctggtttacggatcgacaatgtcaacggtactcgtaaaatggattttaaaatcctggaagtaatcgacagccgctgcctccatgacacccatatagcaggatataggaaaatatggatacatttcaaccatttcgtatcaggaaaaagaaagtaatggccttacctaaatatgcaaaaaaggcacaatcatgcgaccctccgtctcacaactcaaagcagaatgaatgaattttgtaattttcgcaatacctgatgataaacagcacacgtcaaaggatgaggtttatgattctaagtcaaccaacaaaaaaaatatacaaacaaagggaataagaaagaaatgcttatgtccgttttgaatcaaaatccgaaattgtgtaaataacaaaataaagaaaagaaaagaaaaatcaagctcttttctcttcaaaactacaaaggcgttttttttttaagaaatctactgcttccaactggttagagactttaagtaaacaattctcgtctttttacatacgaggaaatagaaagcaaattattcttcgttcctgtccctatggcaaagattcaatgtaaaacaatgaatttggttaagagaagaagagagtcaaacaagaggttaatggtaaatagacggatcttaagttttggcgtagttccggtcctatacggattatgaagtcgttccacagtgggtcgagctgtactaattggataaggcagtttaaaaaaaagccgaatcgaggtaacaacctcggtaccactgagtgagcttcgataccgcgatacgaggcaatgcaattcttgaattattgtttggggcaattaatctgtctaattatgtgttgtattcattaaaacacttgtaaacggctagctattgacattcccaactgaacggtgttatgttttggacgaaataaaaaaggatgtttaaattgtcgcatataaacaatgaagatgcaaaacacaagtataggtgaatgatgaacaaaagactgctttgtttgctttcaaagctccaacaaccgtacgagaagggaaatgcttctgattgatattgggacagaatctgctgaacgaaaggatacaatgcacaagcagtcaatcgcactgtttgagtttttgaaaaaatgcatgccagtcaagattggatatgttgtaaatgatgatgaatactgtgttatacccttttattttccttttaaattcaaagaaagcaatgaacaactcactaatcatctaagcaacgaaagagaaaaaagaatagaaaaaaacgtctattaacaagttaaccaaaaacactaaaatactacgtatagcaatttcaatcttctcgctatgtcctacagacaaccaactcatggttacgtataactatactaaagcagtggtactccatccttatgcaacaattctacaaatggaaattttacaagacacagattttaacgtacttttaaagtatcttacctttatttagatacgcttaaaatctctaaccttttttatcatcctttttctttaccaaactggtttacttgtttctttccttggcaaaaaccgagctacgcaatgatcggcaaagtaaatatccattttcaccgacaagatatggtactcactaagtaatttccattatgtagcaacaataactcttcctatacatttttgttgcctacaatcccatagactatgtcacgttgcactcttccaaaaaggactaccccagaaagagagagagatatgaggaaaaaaatttttgcttctaaataactagagcaaacaagtcccactgttgtcaatcgtcgggtacagcacaataatctcactagtaaaaacatgccatattcatctctgttttaccaaaatagaaaatcaaccttacattgcataatataggaatacggaagcgagccctatacagatggactgggttatggcggttatagacaaaggcgctttcaaaaccataatggatttgaaacgctcaagtagtggaaaacacataatagtaagtataatgccaaatcctttgtagaaaatacacagacctttttattgaaatcgtgaatatgattcttttttttttggtgatctcttttcttattaatgctatatcttttgaatttatttgttttttcttttatttagtagtattttttttgcattttgttatttatctgttcgcttttctgttgtacatgtaatagttgcaacgtacagacaaattaaatttttattattcttatattttttattatttccaagcttatcacataaattacgattaaaatacctaaagtgcaaaatatgatttccaaattgatgattcaatcaagcaaaataattttcttttgagataaggaagaatttgttaaataatcaaaagcacaatttataaggtacaacgattttgaaagtcgctagtatatatgtacacaaatcttgttctgtattccgtgacaggctttgtatttgaacaaagtattgcccagctagacaaaaatcgtttgggcaacaaaattttaaagtagcaagaaatagcttcaaacaattagttgatgcttgaaaaaatacaaagaaatttttcttaccgaattttttccagaaacaacgatacaatacttatataggtgaaatttcccgagaaagctttttaaattccccaacttggaattccaaggttgatttatcaataagtaatttctttacaaaaacgaatgatttttaaatgtctgtaatttatgcctttagcataatgttcatcaatagatcaggaaattcgtttactcatctctagcttattgtttactaattaaggcactatactgatcatagtcgctcacagtgtgtattggcttttacgataatgatacactcgcttttccatcacttaccgcaaaataatgagttacagcgaaagaaaattgcacttgtcaaagacaaactagcttgtcataaacaccagtgccttccccatcaagcaaggaggaatcccaatgtcggcaatagggtctttgatattttgctcagaatgcggtaacttgttggaatcgactactgcccaatggactacttgtgatcagtgtcaatccgtttatccttctgagcaatttgccaatttggtagtggaaacgaagagtagtgcaagtgcttttccttctgctttaaaactcaagcacagtatcgttcaagtagaatctcagaaggaggaggcagcaacggtatgtaacttatttttgtctattcttttcgaatcctttttttcatgttggttgtcattcttctttccttttaggctttgtatcatttggaaaacttttttttttttaagaatgcattaggagagtctaatcaaggaacttttttgtatcatatatccagtgaattgaaaaatcggcacagtcaggcaaaggactttatcatagtccttttttgggtttattgccatactaacaaagttttgtagattgaggaaaaatgtccaaaatgtggaaacgaccatatgactttccatactttgcaattgaggtctgctgatgaaggttctacggtgttttacgaatgtcctcgatgtgcttataaatttagtacaaacaattagattgagttttcatctgttaatcattcttttggttgtgattttctcaatatttcactgtttcttacgccgttcttcatgtatgtatgctgactgatttgtatgaagactattgtttttaatatcttcgattgtccttctgcttccgttattttcatgctcgataaattttatttgtctagtaatacggcaacgttcatgaaatagaaagagatgctcttgatatccgattttcttgttttgtcttctattttatccaggtgttaaaaaaaataacagttcttctgttcttgttggttctatttttcggggttactttttgtttaaaaaataatatggtataacttattcctttattcattattgtctttcctggttcaaactaaatagagaaaattcattgtctatcacgattgaacctgtggatacttcctttctcagaatttttaaagagtttgagtttcaatgtttatcagcattttatgaatagtagtatatcggttatttatttctttttctctaatatggaaatgaatgtgtaacgaaatggagcgtactatgtaccgtaacactcaagagcccaaatgggcaggtaggtgttcaaccatttgaaatatattctcacctgccttttcacatatggcgtctgttaaatcctttaaacgaaaatatttaaaacttcgaaagtcatttgattcggtagtccttgaaacagaggaaattgaacaaaagattgctgaaatatcagaagtttatcgcagaattttattagaaaatgcgtatgtgaatacatttattaaaagtctttgattttatgttaacctcgttcgtagacatttgaatgatctgttgatagacatgaatagcacggttttaccaactcctcctgctagtcctccgggttctccttattgggaagccaagcctgtttcacatacggtatttcttgaaagcccttcggatgtttttactctagaaaaacctatagcaagtactcatcgatggctttctaagttgacggcactttcaaaatcgacaaattctacactctcgaccccaaagtcttttcatagtcctttacaaagccgcgggatttctccttcttctgcacaatcatcagcggctgttagctcgtcacggaagcaaaaacgaaagcgcacctcggaaggtccctctgaacgacgagcacgaaaaaagtagatttttgaataaaccgagcatgtaccttaattgtaataaagtggtgacttatcatttcccctcagtcttagaatttttttcatttcagaacgtttaatataattgatatcttcagcacatgtattcatagaattgaattgattagcctttgtggaaggaatattgaagatttaattctgtcatagtgaaataaaatttgccatacagaaaccaaaatatactataagttgtacattaagaagatatgctaaaatagttgtttgatgttgtcgtttactaaatcccttgcgattcagaaactgctactgaaaatcggattgaaaccagctatattttatgtaatatttctctaagatggatcaaatattcactgatgaatattatgatagaacttattgaacaatgaaacgtaatttgtttatggacatggtacggtgggaatgttgctactgagtctctaaaacaagacagaagacgaataataaaactactttttaaaaatttgtggcatattttgaaacttaaccagtgaatatcattagtcaattaccgcgaaaaagcctacaaagtttgaatcggcagcattcataatgacagttattcggcttggagaaaaggcgtattattgttgattcgaaggatgtaccttttagaaatagatgagttcgtccaatgttggcgttggactgttatgaaatcacaacttattctgcatttttctcagcagcaagcttaacgtaaaactcttcacgttgtctagcagcaggcttgtgatagccaaaccaccaatagcaggcaccgagagtgccaagaatcatagttacagaaaagtctgtgacaattcgtctaataaattcgtcagtttcagcggattcagacatacggcgttattcaaaaccattccttaccttttaaacattccagttacaggaccgacagccattttgatgatacagcaataatttaaacaacttcaaatatttgtcaagagaggggagttggtataagaaatgtaagcagaatccgacttagtttgtgtggacagacggaggtgatcttctattactcactaaagtttgttaatttaagatttcaaaattcgaagaaatgtgctatatttcaaaaacaaaaaaaataatacaacataatgaagataagtcggcctttgaatggtcttaagcaactagtaacgatacctattaatagtgcactcgatatatattgtattactttttacatttctaaatttctgcaaattttttacgttgtttaacggtacaataccatcgtatatcatatactattgatccttaaataccataattcgaaaggtaagctaagaaacattgtttttcttgttctgtagcggatgaggcatagatactcgcaagtatttattgattgaatgactttgttctaactaaatcataccatgaagattgaagtaaaaataaatctgtaaaagttacattttatgcttatttatgtcttttgttctgaacaattcattatatccatttagtttacatgattaacaataattgtgctaggatgtatttcgctatagcaaatagcaaattgctgttgatcgcattatatatgaataatgcagcactgtaacacgagcagagtacttggttcgcacaaaaaactgtgacgaaaaagcttagaaagtgcattctgaagggattctagttttacctgaatattactgagaaagaagacattttcgatttttttaattaaaaacatacatcgcatacattcaaaattcgcttctaaattaaatatagttcaaaatcgacgcaaagtaaacgaacgtctctaaaagctgcactagcaaatcaataaactataatccttgagcctaaaatttataatatatatattagcagcatggaagccgtgatcgcgaatattctacagcagttgggattcgatagcatgactaaagcagcagaagcatcctttgttgaagctgtggacaaatgtaagtcctgtcgaaccgagaaaattaaaattctttatttctaatagcaataatagatttgaggaactcttttcgagaacttgctcttcatactcaattgagcaaacacacaattcctacgactaaagatgtggccttatggctcaatttgttgaatatacccatgtcaagccttcaaacagaattagaaaaatatttaaaacctttacctcctgcaattaatgatgaactagatagactggccaatgaaagtcaggatatcccttcaaaattcaaatcatccttggattcgaaaatggtatctcaacttttgggatccctggcagtgtctcaaaatagaccagcttatgtcgttaatcatttacctccttttcctgcatcacatacttacatggctacccccgtatatcccgttcgtcctacatctcctaaacagattcgtgaactcgcaactcaagaatccaggcttgctgaacatgctcttcgtaaaattttaaatgttaatcaaccacgttctgccgattcgcctcgtcatgcctcatttgaaaaagcgtgctccgagctaaatctcgatgtttcgtcatttcacttagtaaattgggaatcccaaaaatggagctcccaaaggtgaatatacttgttaatttctttccttttacgttaatcaaaaaaagattaacttatttcctttttttttttaatttttctcaacgacaggtcctgactgtaacccaatctgatttgacattggtcgaacttccttcatgtgtccatccaccctatttttgcattagcttttctttctctataataatgttccctatagacttacacttgaaaaaatctttgaactgtaatacagacgacgtcgttctcatgtgcacttactttttcacagatatattgtttcatgcatttatatgccggcttttcaagtttctctttatgacttttttgtgacattgcgaatgaaaatttccttttctctttgtgcagttagttccgctttcaatcaacctatttttattatttgtcgctactccttcattcaataaaattgccttgatcccctctttctcttgtatttaagtagtaaaataacgtaaggagttaataaacaaatgaaataatagaggctctagtacaaattctacgccacagggtttttcgatcgttctgtgcgaatgtaactaagttgtacttttttgtgtatttacgaatatttgctttaaagtaatcgctatcagacttgtcttgcaactgtatttttataaagttccagcataaagcaatttcttcagtgaatacgcagcatctcttcattacacccttaggttatttgaaatgggtaaaatccaagtatgaataatcttatccaaggttttgaagactaatgtcatatgctaacgacagtagattatatgaaatgtatgtagacaaatactaccgatgctttaaagcgcatagcgatttttaccgtactatggttaaatcaagcctacaaatctcggtgacgagttgaacattagattataaacattcatggaggaaaagacaccagaaaatgagcaatcgtatgtatttcagggaacttttttagtttgttaaactaacttgtaggaaaaaaacatttgatccaaaggactctatgaaaatagaagaaactagtacaaatggtagctcacagccatctcaaccttcaaatatcaagctttctatagggtctatcttagaaagttctaatgataacggagatcctgagtactcggaaaatggaatggggaatatgaatatgaatactttaccaatggctacatcgacacccatgtcatataccaaacaaccttctgaagccaaatatccaaattcagtttgggaaaggaaaggggtttccgaccaagaggaaaatacaagctctgttaaacgtcaaaaaactcttcctactcagtcatcaggagaagaggaagccaagtattcacatcctggagcgccaacggctacaagtgctgattccattagtatggaatcgcgtccatccaatttatcaacttccttgtccaaaacgacatcttatccgcaattccaagttcgacaattcgtttctccgataatcagtatagataatagtgcgttggaaccttttcttaaccgatatccagcgtctgaatctttatttccagtcaccgaatatgaatacactccttggcttgaatttcctcttttatattcctcaattggtaagttcgttcgtgtgacaatcgacatcaaatggctgaatgcagccatcaatcccagactttgcagacgagaaatatgggggaccgatgtgtatactgatgattccgatattgctactatacttgcccattgtggatgcttttctcttttgaagccagtcagaaaaattgccgttgtcgacttgtacatacttcctcctttagttcattacaaaggcactaggaaaaaccaaattgagagtagaagctggtcttctcgtcaagatggcataagtcttaaaataaaagaagtaacttggaagccagcgtgtgcctcaatttttgaaaactccatacatacactcactctggaagaacggctacaagctcgcttagagctatcacgctcttctacttttaaaatctaattttttgatattattaatcggtttcttttcaaaaatatttttttttctttttatatatctgcctgtaccaagaaattacttatttttcaacacttcattcaatttcactttcgcgaatttacggaatcgcaaaagcttctcgctctacttcgctaactgtcttttttgtctatgtcaaattcgtgtaataatgtgtccgttgatgtgcaattactacataagcaattagcgttgtacaatatcgcattggttttgcaaaattcctttgccttggcgtcctcgttcctagttactcgtgcgaacgctcgcctccaaaattaggtatcccgcagatagtatattgatccgatgatcatagcaatcaatagtagacttccgcagtctggtttggatattttcggttctacaatcaaagtatatacgtttttaatttaaataccttcaatactattaaacccttttttttgttaatagaggcctcttttttttttcttttttttttttaccactgctttatttacatgacaacgatacgtcggtctcattactcgtgccataacaacacaaacagacagtttgtctttgttcagctgattaactgaagatacaaaagaacaacgtgaataattaattatctggcattgtctaatttcctccgtgtattgagtattgttgattataaagtttgcggaactaatgaggacgcggaatggaatcatagcggaattacagaaattttcattacttttgcgccgtcgtttcaaaatgtaaaattgccgctcattatttaaatttcaaaaatctagggcaagttaaaacatgtagaatatattatttacgagtataaaatcgatggtaaaacaaaactttgaaaatattcgaaaaggtgtagcaaccttttaggcgacgatcgtaagacgcagcacactgtacatcaatttatccttgttggatgctaaatatttatttttgcactaacaactagggcggcggccaacatcatacattacatatgcgttagactggttttcggaaccctaccctaaataaggctgaatgacttgagagcgggggcggtacgctttcttcttttcccaaccataactttggagtacacgacataaataagagcgttgccttaaaagccgcgtgcaactcaatttctggtatatcaagattccagttcttggtttctgactggttcaacgactagccatctactactcaattggtgaattggacgacgaaactgtgtattatcttgtttcacttgctaaagaggagacgtacatctgaggtacagcactctattagtcttaatcgctaagtgctttttcgatccctcaaaattatctgcaggattgcaaggtcgtcaaaatcaccgtgatttcttttattacgttggtaaagtcattcaaagtactgagaaattgttgttggcgattttaactcagttttgcttttgctctattttcaaaaagaagaaaaacgatcatatatatattttattgtgaagactatttgagaatatttttggaaatcatgtattctctttaacaaattcacgtgaatatcttctttcgtgtcgttataggttcaacaagtaattcttttatcgacttatagtatttttttaaaacttgatttttgcgacgctcgtcttacttactcactgctgtccaagtgacttttcgtttgtacctctcataattttttatttatacttcttaaaaacttgagcctctcgttgtttatcacttattgatcgattgacttcattttaagttgatttttttctatcttaactgtgcgattttgaaagttcaactcatctttcctttcagcgaacacatttaactagctcagttacatacattacagctttcgttaaaagtctctactttagacgttatcataaaagattatacaatctgcttttgtcttctttgctattgcttgatcgtctggatactatccttacaattgcactaaatcaaaccatctattttcttatttttattaaggcatccatcgatgactgggttacttagtatacttttgcattacaaaggcaacggcgacttggctactactgacatcccttctcacgagaaaattccgtctgctaaacgcacggctgtacaattttgtattggtccgacccatgagcagtctccgcgtatgtcgaccgtcagtcagggccgagttacgtttgcagtgttacctacaaaaccaaaagatgaagttacctccatgaaagctaatggctctcgtcaatcgtcttgcatcgtttcaaatgcccgaaaacgccagtctgttcattgcctttctagaagtccaattccaagcacccgactgaaggagaatgacagtagactctgcagtcctcttgcttctccgacaggcggactaaagagaccagcaaaagtgtcttttgcacttgctaatactccttcccgtaaagggaatcttgtcccacagtcacctaggagaactattgctactacttgcaaaggtgttttagaggatgtattgaaaaaggacaatgagttgaagtttaacgattctgatgaagaagatgaagtcgatgatgaggagattgaaagtttcaactcattttctcgtaaaatgcaaacaatcagtaactctcgttatcgtggttccccgaaaccaaacattgaaaagcaaagttgctcctctgaatccgatcgcgtttctcaaatcagcgatgatgaggaagatgaagagggatccgctgatgaggaggatgaggaagattcagatgttgagctttccgaatcttccttatccgatgatgaggattctcctcttcgttgtccttctacaccagtccaaacagctgctgctccaaatgaaagtcaaattcccgatgatacggatttcgttcctggtacatttgacgaagatcaacctgcatgtttagcttttgcttgttccttaacgcacgcgaactctaagagatcaataatgttgccccaggatatagatccaacgtttcctgattcggaaccagaagatgatggtcatgcaagttctacagttggctctctttctaaagaggaggcccgttttaaagctaaagccaaatggaattacaagtcttcattttccgcacatgtgtcttctgaagttttgcgcaatagcaagtcaccacctcttgacattgctcgtaaagcagtcggcgcacatcgtgtttaaaccaaagaaaaaattggataattatccgttcttgtacattaataaatggaatagtaaagtttagtcgcatttagtcatctaaggttgttgttatgtgcgcattttcttcatgagtttcattatgctttgtagcattatccattcgttacgttatcatttgtttgttatacttgttaaaaaataacatattattccaaccagttatcgagtattaacagaaaatatgtatattaataaactattttacacataaaaagtacacagtgttaaataaaactaagatcccaattgtgatacgatcaccagcgcgataagacaaattctggattctcaaaattgctcttaaggcaatctacaaacttaattgcacggcttttgctgatgttgtccttgatggacaatgtcagggtcaaatcctcagtagtagatggctcctcgtgacgatttattctggaatcgatactatcgctgttgctacccagcagcatatcataaacatcatccaaaaattcaacgttattagaagagctttttgtcacagaactgaagttcagctttacatagtcgcttaaattgctaggtaaactgtacggttaatatcagagcaatcgcaatgaaaagtcttaccctatcatagaatcacgaatgtatttgtgtaaatctttagtgttattgttttttgggaatagcttaggttgaaaatttgaaaccgaagactttaattttacgattggagcgcctagaagtaaatcgtaagcagattcaattgagttaggttcaactttcgacaattcagatatagaaagagcatcaccaatcattgctgagacgacttcatcaataccaaatgcatctttttctgaaaaagatattagcaataaaatataataaaaggacattacaataccttttcttttagctagcaaagattttaacttttctagtgaaatagatctctcaaaagtgatatattcatctttcatcggaacagtttttaaagtttctatcatcgttgatttcctaacgggaacgctgtcttcagtgtacgatggttttttaggctcaacgccagaaaaatccaaaacctcgagattacgaacaaatttttgaagagatgaaggaacccctttatcaatttttccgacgtgtgctaatacatctcctttgagaaggcgaccatgagggcctgtagcaggaatagaccacgggttttcgattttatattgatgaatcaaatagctaacggaaggaagaaacgatttgttaacagcatcgttcgcttgagaagtcgatttgtgttccacattactttttgtttcgcgatcttgaacaataggctttacctcttccttagaagaggagaaagattgctcttctgaggacgcttcatccttaggtaattccaagtctttcaaattatcttctgcatcagcaacgatggcaatatttttaccaacagggatattcgatcctttttcgattaagactttagcaagtattccattatcttgcacttcaacatccattgtcgctttatctaaaataccgttagttcaaagtcatggatgtttaagattattagtctatcatttttcatacataccagtctcaacttccaaaagtatatcaccacttttaaacgaatcacctacgtaaagaattagatttaggaaatctcaatataccaaccttctttaaaatgccatttagtaatgtttccttcctccatagtaggagaaagtgcaggcatacgaaacatgcttgcaactccattaagagcagaacaatggaaatctacaaaaaattattctgttaacttcgttatttcaataaaaaaaaacactagtactcacatctttgtttaacggaaagcgaatgtttgcatgaactcgctttcacacattggtgaatgtaatgcttcaacatcgtttcccctgaagtttacaaaaatttagcaaacaaaaatataaagagttgacttgatattgagcaaactttcgaaatatgatgttgggaaaagatcaggtgctgtgctagcagcgaaggagatctatatctgatctgttagtgttcccagcgctcaccaaacataagggctagcataatgaccccctaaatttgtgaattgctttcaatttcaacattaatcggtttttaagttactactagataagtattttgggagggtaaacgctaccgatgatatatagttttcgagagacttggcttcctcctactgctcttatttcctaaactttttgttaaattcaacgtcttagctctcacgtaaaagtgatgttttgattttttatttactctttttcgcttgcaatcataaaacgaacatcttacatacgcaacaaacctataaaactttgaaattttttaagttcggatctaacaccgaactcattatcaagttgatgactttaattacagggtgttagacaatttgttatttttttaaatattatacactttccttttctggccaacagacatatctcaaatttgaagtgaagttatataaatgctttgtctggtatataattctattttgtgcaagcaacgtcgaatttctttaaaagttttacaacagtttcgctgttggaacatctctaaaacttttctatcctatcgaacacttacagccttagctatcgagacgtcttgtgatgatacatcggtttctgtgtacgtatatttcacatatcctcactaatttattatagcgttcgaacctcagattcatcatcacattgccaaaacgagatcatttgcttaaatacacaccggacaatttcaaaatacgaggcttatggtggtatccatcctaccatagttattcatgagcatcaaaagaatttagcgaaagtaatccaaaggactatctcagatgccgcgcgtagtggtattactgattttgaccttattgctgtcacaagaggcccaggaatgattggtccccttgctgtgggtttaaatacagccaaaggcctcgcggttggccttcaaaaacctttacttgcggttcatcacatggtaagtaacgaattcctaagttgagcttgtaagattgttaatgaagagtttgtagcaagcacatgcccttgcagtgcaactagaaaagtctattgatttcccatatcttaatattcttgtctcaggtggacacactatgctagtgtattccaattctctgttaaatcacgagattattgtcacaaccagtgatattgctgtaggcgattatctggacaaatgtgcaaagtatttgggtattccttgggacaatgaaatgcctgctgctgctcttgaacagtttgcttctcctgaaataaatagtactagttattcattaaaaccgccaatcccactgaatactagagaaaaggtgcatagcgcgagcttctctttttcaggcttggagtcgtacgcctgtcgaataataaggaagacgcctttaaatctaagtgaaaaaaagttttttgcctatcaacttcaatatgctgcttttcaacatatatgtcaaaaaacgttgctagcgttgaaacgactggatttatcgaaagttaagtaccttgtatgcagtggtggtgtcgctagaaacgaattgttgaaaaagatgctgaatgatactttaatggtattgcagtttgaacatcaacctacagacatcaaattggtgtacccaagtccagatatatgcagtgataatgctgccatgataggctatactgctattcaaatgttcaaagcaggttatacatcttcatttgatgttgagcccataagaaaatggcccatcaatcagattttaaccgttgaaggttggcttacaaaaaaaaataaaaaagtataaatattagaaattaataatagtttgtactatggaacaatgaatgcataatgaatgtaaaaattttctatgccaacaaaaaatagggtgaatatgttgtacgacataaagtaagagaaagaaatttcgggttcctgtcattagcaggaaaattgtgattagttaacaaagacaggtttcgaaattgagtgtcaccattgataatcaagcaaatgcttattagctagcatttaatttccccaacagaccatcgattaattttttgagaaagaattcaagagttgcgtgaagtccagtggtatccactattgcttgaaaatcttccatagtgatctgaaaactacgtcggtcctgacaaccactaaaacagctttttaaaaactcgcttataacggttagccgctcttcgtccttttcatctccttcataacagcaaagcagaattaacgattctgaaagttcgacaacttcttccgtcctaagtgtgccatctcttttcaaatcgtacaactgaaaacacaagatttcagaatgcagtgctatatctgctttcaaccgttccaaaccatgaatgattcttttgaaagttaaagatgtttcagtagaatcaccgtctttcatccaaatatataatctggtaaaaagtttccgcttactacgttgataatgcaaaggttcacgaatcacacttaaaggtggggctgcacaatcgacaagcctttcaaatccattgaaatcaatcttttgttctaagacgtcgccgtgacaaatattattttccccaatggcattaatgaacgcatcatataccaaatctaaatcagtgttcgataataaggtagtttggtatacgcttcgtaagtgtgatcgcttggtaaaacatcgtaaagaatagagcacactactcttgaattcttttcttttggcagacacaaaactatcggtaataaaatcaaagtactcaaaagcgacagcaaataactgtggaagggtacacatagaagatctactacctaaagcagccatcttttcatcggcagctgttccttggttgatatgatcaaaacattgacgaaacactttcataacagaagaatcgtctgtcgcatttaaaatcccttgggcatttactttgaacagagctaaagccacttgaaaaagaacacgtggaccgttaacgaatagacagtctaatatcctgaaagcataatctaacctaaagtcttttatgaacaacgaaaagaaccagttgattgtaataagcttcaaatccatatctagctcaataattttctgatataagtgaggaagcgtatgttctaaaacatactcaaataccgttaaatccagtaatagcccatgtattatcttagcgtaatacccaggaatataaaactcacatagttgagaaaaaagaaagtatgcttgctcttctgtgcaataaaccagcaaagcagcaagcacaatgttcatagcctgacaataaccaacctctttattggtctcagaataaaacagaaggattcttctcaatgtattaatgcccgtaggtgattgataagcaggataatcaggaagacttcgtgtcaagtccttttcgatttcctcactatattcacaacggttgttaataacgctatcaatgttctttgcgtaaaatcctttagatttccatcttggaaacaagctaccagagcatgtttcccaaatgtctgctcgtaaattgtttgggatacccgactgaacaagcttttgaaaatttggagtttgtatgagattaaaattagcaccgtttttttttagatattgaatccagcttttggagttattttcattgattaaaccatttgtattgctgcttgctatcggataaccaaactgcgaaccaagacctaagtcaatgctctcgatttcttgtgaattggctgattcagaaaaacagactctttcggatgctagtgataacaaaaataaaccaacgcttgaagcatcctcaagagaagcatgtaactggcgaactagtcggtcacaaaagaattctgattgctgtctcgttcctttaaacctcaagtgaattatctgactgtgaaagttagagagatcaaaagtaaatgtatcattgtctgaattttccctttctagctttcgaacggcagctaaagggaaagtgaaacgtgttttgaaatcatcgctatgaaaacagagaaaagaagtacatatgtaagcatttccaaaagatttagagtattcccagcctatttcacagacagtactagctataatttcttcttgtttgttgatacgaaaaaaactggcaggatctagtgtcccttcataagcatcatagtcatcttccaaaaatatatgcttcaaaaggttcattgaaaaatcattctgaacctttataaaagtaaaggttccagatctatggctaaatgacacaggtttctaatgattgtaattttttgtgttggagataggtttttggtaagtgtacgaagacaagtgtaaaatgcttacagcaagcgatagggatatcttagaaccattttatacaagttgcatcaaataaactattgtgttttataataaagtcttgagtcaccgataaatgtcaatatcactgaatttgattaagaggatttcgggtggaaaagtgacagaaatttaaagttagtaattactgtaacggtgattttatgacgccttttttttaaaaaaaagaaaaaggcattaagctatttaatgggtgtgaggttcgagtactcgatgtaatattattatttaaagcattcgtgaattttggaatgcctttagttatgtacgaaatgattaacaacgtaagcatctattttttaaataaaaaaaaagtaaaacagacaacgaagcgaacgaaatgcgtaataaagtattttcgaaaacctaaatacaagacttcttgaggcttttatttagtacggggataagaaatcgctttgaacattaaacagtgtatttgaacggcagccattacgacatagtaagtcgttcaaacatacagtgtgctgtagaaagcgtcgaagttcactgtctggagaatgtccagtaagttctaaatcattagttttcatgtatcacttcatgtcttgagattaacttacccagtaataagcaattgatttgttctgccatatatttatgaaagtcgctactcataaaaaacgataatgggcttgaaaatgggtcaaaatatgcaagcaatcccatgcttaatttaatcatcgcctgcaagttgctgctctttgtatgctcataatcattagaaagttcttgagcataattcattaaaggttggagtatacgtaaatcttcttcttgagagatttgcttggtgcctttacttttggtaagccgctgatcatgagtcactttcactagttgaaggaaacgtaaaaatcttaaagacataataaggtcagggcattcctggatagcaactggatattgacagtcgatttttgtcatagcaaggtcgagctggccattagcaagcatagaactaatttctaataagtgtcaatgtcatattgttcagtaaaaagcgaaaatataccttttctaatacttgcgtcagagacttcggtgttctctgggcaaaacttcttggcggtttcaacaaatccattattgagcagaaacgatgaaatcagctcgtttagaaattcttgacgctgttttaactcttcctgctttggtgacttagttgcctgttcaaataatttgtttttctccatttgaatagcataatcaatgtcgtaaagaaatgggttctgtccgaaattaacctcaacatgttcaccatgacttttcaatccgataacagggtacaaaacgtcgctgactttcttaaatgctacacccaaataggcaccatttttggtgtagaaaattgtcctgttgataaaattaactccacagcctataatgtcaccagtggtaaattcaggtccataagcttcacccgttttagagcaattaaatttctcaccactgtttccgtggtatccccagctttctgctgtacaacctggaagcctattagtttgcatgctcttccgacaaaatccaacacccatttttccctcttttcctcgagataaaatttgaatttcataatagtagatagaagtgtttgatggaattgcatgatcagcttttacagacgccgcatcatgttcagtgccggcttcaggacctattaaagattagttataaaccattataattaatacaacgaaccaaagaaataaacccccatgttgttattcatcaattctaatgaatctgacttatcgttgggattccatgaagatggaatggctttcggcgtatttgttacattgccctcccttgtcatgtcaaactctcgtaaatacttctcccatttcagccatcgtgggtcacttctaagcacattttctccgtaattggttccttgtaaatacaaggggagattgtcgaagttaatcggctgtttttcaagattctttggtgtactagtcattcgcaggtatgctcttggtagcatataaacagccagttttagtagcttattcagctatcagtttaaatgttcaattttctaatcagtttttcttttgtaattaaatacaaatcttttgtaataataattggtaaaactcttaaatttttaaatgacgtgtaaatttcagcaactctataaaatgctctgagactgaaaagatacttcactatacggcttcataaggattaaaggctcaaaattagaaatacaaatattaggctgtatatacagtcctattactaatcagaaaaaaattcaggcacaacataacattgatacttgtcttgcgataatacataacacaatgacattgagaatcaataataataaaatagtattataatctaacggaaagctaaaaaaacgactgcattaacggaatgcattaaacaagaatagctttaatcgagcatcataataacaacttcaacttctggaactaaataatgatagacggtccttaaaaaaccattcggtggttttcaggaggttgtggcattgcatgaaggaattgcttaatcgatgagatgaaataatttcaacttccattatcaatgaagaaagtttaactaaagacattttttcaagcattgaataggaaaagaaaatccatatgactaaacagaaatgaaaatgagtatgaaatagaccggcctaactaaatttcatcgatttctttatatctctgcattaaaagacgtttgtactcgatagggtctttactccacaattctgcagctctaagaattgttaataatcaaaaaaggtaaatgagatattttcaacatactgagcattcaagggagaagcattgtttggctcacccagcagactttgtagagataacaaaattgtctgtacgttatagactgctgaccatttatcttttaaaatgtctaaacatatgtttccactcatatcgacattggggtgccacattggtgaagtaaaaatgatagttggaggggaatatgggtaattagctggaaatgacattgaaattttaaatttcaatccttcatagtactattttcgttacgttagtcgtatgaaaaagaagaaagaagagtagacagttatgaaaatgtaatgacaaagatgtgtattaattttccattaaagtgcagctacaagtaagcacaccaagcattattcatatactttaaatattaagctttcaaaataaaagtcataccgtatcgcttgggccggtaattgtgccagcccaatgtagcaggttagaatcagaatctggaaacgcactaattccaggagtattggacatctagtcataaaaccctagttaataacaaagtaaaaaagcttattacaaaccattaaactcattaattcgcttctcaatctacaaatgcattagagacttttttcctaaaaactgtttattttttaccgttttgtaacgctatgaccgtcaacagccatgccagcagaagaagagtttttagaattagtatgagggttctggttttgcatatcagaatccattcctcaagttgttactgtagtttctcaatgagtacgtggtggtaggagagtaagttataaacacaacacaacatgtgctaatgtacacaagtaaacgaaaaccggatatcaaattatagtccaattttatatcattatatagatttaaaactcatttaaaaattaccttaatttaatcttttccagtctttgatgatgttaagactgtaaataatacacatgccaaaatttgcaacatatgcttgtgttatattataatcttctttccctttacaccaaagaatggctcaaaaattagataactttccttaccatattggtagagaaataggtactggggcttttgcttcgtatgaattttgatttgaaaaatactatatactaacttaagcaagcgtccgtttatgttacgatgataatgctaaaatatatgctgtcaaatttgtcaataaaaaacatgctactagttgtatgaatgcaggggtatgggctagaaggatggctagtgaaatacaacttcacaaactatgcaatggacataaaaatatcattcatttttataatacagcagaaaatccccaatggagatgggtagtacttgaatttgctcaaggtggtgacttatttgacaaaataggtgggtgcatgaacctttcgtttttactaacggacttacaatttagagcctgatgtaggtattgatgaggacgtcgctcagttttattttgctcaacttatggaaggtatttccttcatgcactctaaaggtgtcgcgcatcgagacttgaaacctgagaacatccttttagattacaatggtaacttaaagatttcagacttcggctttgcatctttattttcctataaaggtaaaagtaggcttttgaatagtccagtgggtagtccaccatacgctgctccagaaattacacagcagtatgatggttcaaaagttgatgtctggtcctgcggtataattctttttgctttgttattaggcaacacaccttgggatgaagcaattagcaacactggtgactacttgctttataaaaaacaatgtgaacgcccgtcttaccacccatggaacttgttgtctccaggagcctattgtaagtcctgactgaaattcctttaaactaatgatcagcgattatcaccggaatgcttcgaagtgatccatttaagcgctactctgtcaaacatgttgtacagcacccatggcttacctcaagtacaccatttcgaactaaaaatgggaattgtgccgatcctgtagcattggcatcaaggctcatgttgaaacttcgtattgatttagataaaccacgtcttgcctcatctagagcatctcaaaagtaagatcttgcacagttgtttcatatttctaactctttcaattagcgatagcggtttttcaatgacacagccagcttttaaaaaaaatgaccaaaaggagttggatcgtgtagaagtttatggcgccttatcccagccagtacaacttaataaaaatattgacgttactgaaatccttgaaaaagacccctcattgagtcagttttgtgagaatgaaggttttattaaaagattggtattatttatttaaacctaaattttttctaactatatgaaaaaggccaaaaaggctaagaatttctacgaaatttgtcctcctgaaagactcactaggttttattctagggcgtcgagagaaaccattatagatcatctttatgacagtctacgactacttgcaatctcagtgactatgaaatatgttcgaaatcagaccatcctttatgttaatttacatgataaacggaaatgtctcttgcaaggtgttattgaactaactaatttaggccataacttagagcttataaactttataaagcgtaatggggatcctcttgaatggagaaaattttttaaagtatgtctttatcatagggatttcatatactaatccatgtgaaagaacgttgtcagttcaatagggaagccgattgttcttacagatgtttcacaaaattaattgcacatcttttgaaaggtcgtgccagttcgtttgtaaaagaaacctgttgtttgacttcgttgtgaatttattttcaattttgtggtagtacaaatgatatcctagggaataggattattaacgctttgtcaagcaaatatcaatggttgcgaatgctgaagatatattattagcataaggatagttcttccgactggccatgccgtttaatacatcattgtacccaatattcttttctcacaattctttcttctttttctcttttttagtgagatatctgacggctcatttgattttaaaagggataactcttctgaaataactctttcaaacgattctaaaaggtcttcattttcttggtcggagtataaaaactcatcttctttacaaaatagtaaaaggttcttttttgtgaattcttgtctctctttggcttccaggtaagcatgcaaaggaaaatgtgacatcgatgaaccagtacttatcaatgtagttatccataaaatatcgtctggagtctctgcagacattaacatgtcttctcttgtagcctcatctacttttaaaaacttctttccgtgaagtacttcgggaagctctaagaaacagttaaagccctcacacacgatatgtagccagcgatgattttcagtaacaacgtatatatccgaagattcaattaaatgcatccggatgtctcctattctcttttcggctgctactttgtgaacaggtgttagttctcctaaactcaccttttcattcactagtcgttctaatgctttccatagatatgtttggtgagcaggaggataaagatcatatagcattagctgatgagttaataccttgatgtccattatccctttagacaactttaagtgaagccttttaatacagctgttcttgtttacaagtgatagcatattttcaaggcagctattagttatttgaggtttcactaatgtttttgatgttccatttttagtatcgaagacattcatcaagtttttatcttcgtgctcaaagatggtaatagttactgtaggtggaaaaaaggctttactcttgaattgaacatcttcgatacatatatctaggttatcacaaaagaagtttacccaaggaatttcagtagagcacatgtctgatacttgggcaaatttgcaaaagcttggggtaataaccttttggtcactgaaaagaaactttgtgcattgctgtgacaagtcgaggaccctttcattatcttttttttcttttattgtagcctgttcgtttctagagcttttggattcgagtacactttcatatttcaattcagaatcatatattggcgatacttcactggaagcgatgaggtcggaatatataatctgtgtttcttctaggtcgggaaattcggtaaaatcttttactccttctattatggcttgttcattttcaaagcacttagattcgagtatattttcaattgctaattcagaatcatatatcggcgatatttcacttaaagtcgtggattcgggatataaaatctgtgaagatagtgataagtcagaaagctcagagctctgttttatatcttttaattcagcattttctgagtggttcggtttgtgggtacctttaggtgctgatttggaattattaattggcgccaatttgctcaaggttgtaaatctacagcttagaagctgtggataccgaggcttaaatatatctttatctcccgtattgctttctttcaatagtgccctcttcggttgagttaaatgcgaaaatgcctttgttgcttttattgcggatgtaacctgactaatggaagaattttcgttaaatttttcaggttttgtttggtatttacgagctgccaaatgtaatttgatgttactattcgttgaagatgatattgattcctttttattgtatgcagcattccagtattgggataaacttttaaacggcgagctattaatagttgaaagtttcgtctggagttctgattccataaaagaggtgccgcccaattgcagtatacaagctatgaatgttattggcttgcttacgccgagcttgtcgaaaaggttattagcctttgaaggattttggtttgaagacttattttcctgttgacttaagaagccttcttcattttttttttttaaagtataattgttctctattgattttggctcaacttggggttctaatggcatttctgccatgctttcatcgttatcagaacccatacagcagagaggagcgcaaatttttaggatctttgatttaaaacttgtccaagagctaccagagcagtgagtatcacatcggttactttttcccttttcctgtattttatcaggacgaaaggcacctgatattttaatctctggataagcaattttactgttcattacgaagttacttggctcttttgaggcttgagtgattgccagttggataactcagtaattagagatcgtgttcaatctcttgaagtgtatacaaaggttgggtaaaacatgttcaaccttgggttatttatattaaaaaacaattcatttcgtttatattaacacattgttttatcataactaataatttatgaaatccctcacaataaacaaacatcgaatgataatttgatgctcacctaacatttgcttaaaaaagtgttaagtaaacatttaatattactaaaagatgatcatttaaaaataaaagctttcgctaaccatttgcatcctggataaatagctcaaataacaaaggatttagattaactgaatagtaataatatccttagctaagcctttgaactaagcctaaataaacaacaccaattactcactatttacaatggatgtttgacttgtaaccaataaggaggcaagatttactaaagacaaccaagtataatgttgtaaacaaaaataataaacaaatcaacattgctgcaattatacattcgaaaagaatcatttaacgcaattctgagttaaaggaaaataatgtgtaaataaacaaacgaaaaagagtggaatactagcaactgtaaataaacagaagttattttttagtgatcgaattatattgtatttatgttgtcaaaagttattgattcatgaatacccccgaaaatatctttctgaagtaaaaatttcagaaaatagaaagtgttttattttcgttcgtatgttagtacgaatatcaaatttccagtttcatattgcgtgaccaacacattatttattaaaaattttggacaagccagaactcgaatctgggacctcttccatgctaaggaagcgtgataaccatctacaccacatgcccatggttgatttttactctatgttagtcgattattacttcctttactatttgctattattcttttccaacgcactttgatactacccacgcttatcatagtatacaaatataacatacatacaaatacaacatacatacatatatgtatatatatatatatttactaccactgcaaataattgttacgcctttactactgttgagttttcctccgtttttttatttgttttttctattgttttaaattaattattaactatctttctttttagtccaaatactcaaaaatacttcaaactagcttcattagtaacattaactaactaaattttttattcagtttttgtttgtatatttttcagcacttaatatttcttaagataattatttttacagtttccctcttcttttttttttttatttaaatccgatgcgaaaataattaattacaaacaacagataattagtaattacacttttgaaaaaaatgagaactacaatggaacaagtaaataaaaaaaaaaatttaatccaaccaaaattgctgatctcattttatttaaaaaagtaaaaatgatttcattccaaaagaatcgttaattaataaagcagatataatttcttttttaaaagtaaaaaaattaaaaactaaaaaacgattgatcgtgccaagactcgaacttgggaccgtctgcgaactgtaaatgttaagcagaaattataaccatctaaaccacacgaccagatgttagcctaactcttattatatctggtataagcgtagtttaataactggctaattgagtaatgaagagccacagatttcgcaaccttcacaaatgctttacgctacctcgttaattaaaaagctagaccacttaccatagatttttgttcgaattaaccaaactgcccgatacaacactactaacatgtgttttagcttcttcattactatttggcgaatccaaaatatcttgaggaatttatagaatttactgtaaattagttcacgacatgttaattttcctcaattggactctgtttgcaaactttgcttcatcgttgatttaatgattaaagttcaatattttaaaaatgataataatttgaaatctgcaaaatagcttaaatgtaagaaaagccattttactaaaagctatagtataaaacttcttttttctggaaacatttattgttagtccaaatcaacgaagatgcataatttttttgataatgacgctatcaaacagttaataaatcactttaaagccgcctttcgttaacacgcaatttccaaaatatcaactgctacactaagcttatctaaaaagaaattgctcgttagtgtaagaatagattgtcataaaatctcacatgtgggaatacacaaaagctggtcaagcagaggaaatatacataatgtggtaccttatcagtttaagtaatatgcatatatgactaagttattataccctattacttcatgtataactttgaatttacaaaggacactatgcctgagtggttaaagggacagactagaaatctgttgcggtctccgcgcgcaggttcaaatcctgctggtgtcgtatttttgctgttatccatccacttacggtaaagttacctaataccatatttagatcatgacggaatttttgtattttagtatgatctatattcttcgttgtggatattgtatccttccatacatcttctatagaactaacaaaaaacacagacagcttttatactttaaaactgctaatgttgatcattgttacaaaacaacatatactttcaaatacaataattgacttacagataattaaacaagtaattcacacccattttttcaatatttctattgcatgttgacagtaattattttctttacattatatataatctaaaataactaaaactgcagtattatcaaataaatgacatacgttgtcataaaaacatttacgagtgtgacaggactcgaacctgcagtctttggtgccgaaaaccaacgccttaaccattaggctacacacccatctttaaaaagaatgtttaaatataaacttatatagattttgaaatgtagatgcaatgtttatctagctaaatattcgtataataaatttaagtgtacaaataaccatggcttcattatattatagactattaaaatactaagttatttaactttacattaaatatccgcgactttattgcaaacgattcaacagtaatggcattcgtcgattttgcgcaagcatctaaaatttaattttattggcgccaaaacttttaaatttgtttactctgaaaagcacctttatgctgagtcgcaaaacaagacctaagttattggatatcagagattaaaattttggtttagttcaaaatttctgataaaatataatattgcactcgtaaagagattctttgatagtttgtgaactcaaatatgcagtgtttgtatatttttaaatgaaaaattataacgagtttgaatatctaactagctgagatccttgaaagtaaagtacagctttttgcagggataaaacacgcttgaaattgtttatgaacatgctaatactcgattccaaaaatcataatcaagccagatgataagccagctagcatcttattaaattatgtcgtataaaagcttatttcaaaagaatttaggtttttttggatcattattaaagtactagatgttcttcggaaaatccagttagcctatatgatattggttacttgtgtttgttgtaagaaatgaaagatatgcagaattaaagctatatcatatctataatcaacacataagaataccattacagatcatttttactctcgtaaaataattattataaataaataggctataaaatttaaggagtcattgtctcctttagtataggggtagtacacaagcctgtcacgcttgcagcccgggttcgaatcccggagggagaggattcttttacgttttttttcacatgttttgtgactttacttaaccaaaataccaaaaattttgatttagtgctaaaaaggtcgatcccgccaggagtcgaacctggaatctcttgatccgtagtcaagcgccttaaccattgggccacgagaccttattgtaatctttctcaatcaagaacattttatttatttgaattaattgaaaatattttgctatcattgaagttaattataataatggtgtaacaacttttgacatttaattcaataaacattcgaagtacaaaaacagattattattgtacttagaggctaatattgtgtttaggacacagtacttaatatactaggttttagtctataactgcaattgctcgtcaataacttgctgaaaaaatggttttttagtctagagttattttgacatttattatttataataaggcttacaataattgggatatacttactagactacagatggaaagtccagtttttaaagttaatcaagatttattatgatgtataattcctgtttatgtcagctctaagtcatgaaaaaggaaatttttgttttctaaccattctataatcagccaaagtcaattgataaaaaaaaatcgttttgaatttcatcgtttttgaggagtttgtgttgacatttggaaaagtcacactttagctacgattttataacatcatgctttattcagttattctaataaaatgactcagactcattgcaaagtatgtaagtgtttgacgagatttgtcaatcaaccatttttaaaggaatagcaagtaacctttcaacatcaagacgccggaactttaagaactttagctgcgtgttaaacgcggtgataatagttatggagttttaatattaggcattttcgctacctaagcaaaattaatttagtagcgatgatattagatagtaaactcttagtttatccatggcatcccgatatgaaatttcttgtttcaataaatgcaaacgtatattagttgattattcgaaaaagctatgttttattttttcagatttatttccgaaagcggaagggtgtccgagtggttatggagctagtttaaggcactagtgcgaaagctcgtgggttcgagtcccacccctttcagtactgaaaatttttggagttttttatatttttaaaaataaagcatggtaaatttttctaaacaagcgtacttgacatgcggttaacgatgattttcatttgttttaagctattttagcaatactggatataaaaacagccctagttatccgttatagtcgtattcttttgttggtaaaattagaatcagacaagtaattaaaagttggattggaaatttttttttttttaacgataaatcactgtgccgaagtggaaacgtggagcattttaaagtaaatttgagagctaattgtcttgtaatttatgaagtttctcacatggattgatcctgtaagtatattttattttaaactggtcagcaaacaaaattttgttgagagaaacagaaatattcatcaaaccacctaaacgattgttgcacgatctgattgcttcgtaaccaactgtctttgtttaatggcaagctttttggtgcctgtatataaggattcacaactaaaatgtgcaaactgaaagctaattttatactcaatttaaaattttaatctttgaaatggcagcaagagatatcaccaatcactgaaacgaaaatccgtataatgtgtttaaatatttattacattcaaattgcgaatcttactaaaacaattgacatgttaaagtagcatagaaacatttttgagtgttgttcaggtttcattatttacgttcactaacggataaagtaatatttggtgtgtttttgttactatggataaagataattgtttaacgaaaacggtttactttgaaaactacttaatgataatgaaaacagtactattattggattttcgtcgtcatactaagtatgttgctgcatacttaatgagtagtcgaattggattatttattctcagttccgttgcacagttacactgatgaacctggcctatagaaacataattaaatataataggatcgtgattaaattatgttggttacagaggtggatgatttatgcgttcactttgaattcataaacattggtttatttaagctacagtttgctcgcgctcgaaaaaattggttatatattaagacggacaagacttgttgatttttaatgtacatttacctgtacattgaagttagcatagaaattttatttacacattatgttagtacggttatgattctatagacgggccgtccaatctaaacaacgcttttactgtttatgctttacttgtcttcatgaatatgaaaaccaattaattactgattacattttttgtcattcttcccatctgcgtttgaagtcagaatcaaacgacagcaatctttggaacgctcttacccatttagaattgcttagagtaaagaccttttcgagaacttgaaaggttgcctcacacagtttttcaaaaactctaaagttgtgttctgtgaagaattgtacattgaattgtcatgtttgccagaagccctggattcattacctaaaaactatccttttaaggactttctcgatacgttggttcgttcaactgagtttatgttattatacaagtacgaaggaaaaatatgtttgaacatagtcagttgaattgcagtacaatttacttaattttgttggatatgcatgagaaagacaacaaccatataatcatgagacatcactatttctttgtaaaggacatattccatcgtcaactacctgattattttattttaaagccattgcttgttaaaaattatagtaacttttatgatcattgttgacttctttctatgacgtaatatgtgtcctaaaaaaaggtaataaatataaattgttctatgtatactctcagctaaaacccgtcccgagtggctcaatcggtttagagcgtctgactcttatgatggtcatcagaaggttgcgagttcgagtctcgccttgggagtttagtaatcctagtattgggatttaaattattttttattctgattgaatagttctaaaacctaacgctttttaacaatttttattctaatgaaaacacccgaagggtgttgaacacgatccgtaaagactaaacgtggcaatcgaaaattatattaacttagatttatccttaatgaagttaacaattatggatttaaaagtacgaaagtcgaaatatattgttggttgatttgaaatactttttttgaaagctcaaatttaatgttcattttgtatgatataagcatcgggtatattctcgaccgcaattgatatttatgttttcattcatcggaacgttttcttgggaaaagcatttcatccccagcgtagttataaaaacaaagtaaaaagtccgaagaatgcaattaaaatgatggtaccgtaatcgtaaaaacgttatctaagctgataatatttttaataaagaaaaaattatggaagtcagcaatttcttttcgttactaacctagcttggcttcaggagtcaccaataatttaacttcaaacagtccaaacacagcaccattttttatattttaattttctgactgtattaatgttaaactacaattcgcatatgtccactcaacatgctatcatgattattcattttccactttgatttctttcgataaaagaattggcaaaataattgacgttacaacaatcgtaatgagatagctcgttataccgaatttttaagcattgctaactcctcgcttcatacgatacgtatgctgctccgtatcatcagtaagaattcactatgctagacattactgtttcaaatatactccaacctaattaaattgcttttctgatggtttgcatgctgcttaatacactttatctgaaaatataatttacaacgaataacgttgcatctcaaaaccctcgtgcacttactttatgactagtcaataacaaatcataaatcagtggaagaatataatcttagttataatggtaataataaacttgatcagtttatgactaattttttgctactctatttctctgtctacgtacgccagttgctcatacttactatatctttagttaaagtatgtggcataacaattgagtaaataaaaataaaaaaaataaacactttttaaatatggtacttgatttataaacacacatgtttaagtatatgtacatatacaaaccaacgaaatgtaataatacatccaagtgataagaatgcaaaaacttattcaacagcagatacaccgtttcttctgtttataacagcataacgtaacatatagaattggagacaatataaggtcttgttgagttgttatacctttcgaggtaataacggttgattggaagagctaaagttctgcggtaaatccctaggtcgaacatcaaccatcgaaaaatcgcacaaattatttttagtctatttgaacttttatgctttatatggtcatcaatattcacgcctaaatttcataaatttgaaatttaaaaagtaaaaacaccaaaaaaaaagcaacatagacgagagactgcgcaaagtaaaatttggcgactaaaccgaaagcctcgatatcatctatatttaatgactacttaagttgagaatagtattcgattttttacacttttaaaggaggacgaaatgtgacattatgttcatttttcttgtttgttaaactccataaccaccaccatgctcttttgttttaaaataacattgacaaaaatcattttctaacgcatatttggaaatcataaacaccaatctataattgctttagtttttgagaagcataactaaatcatcctctcaaatacaaggatactattttggacagaatggatggatattgacagttcaaatcgttgcgatactttttattcttataatatggaattacaaataccgtgattagccttactccgcattagggtactgaaaacatctaaacccatcctactctatcttgcggtgactgcttatcttttgcaacccacatatcggttttcattgtgtatcatcttcctggatatcctttgtaatagtttaatcgtagtagataaacaagcaatgagtaagaaaaaaaatgtagtacgacgatgatgtgttttctcaagatgataacggatctagcttcgccatcaataagtatgagacaaaggagtccatctttgatgaaacatccattttcctgttgtacatttttgcaggacaactagcctgagcacaagagacatggtgtactagaccttgtgcggaatgtctacttcaaaacttgcatctttatatctgatatatagagatatagagatatagagatatagagagaggctgatgatttataaacacaaacgataagacttgtaacatgaagtttatcgaaaaagtcaatctttaaattcctttctgaacctctctgttatgtcagtgcttcggtaccatgcttttagtgcggtcatttaaaggcatagcgatgatagttctaaagttactgtattgatcaattggaagaacatccaaataaaaaaaagcatgcaaaatgctagtattatcagtaactgcaaataaaaaaagataacaaaaatttacaggatcatcgagaagagtagatactgataatattgagatccacagcactcaacaacagtcttggatttatttagccatttgcttaacttactgtctcaacaatattgttgtttggcatcgccataaatatatgacctagaagtaaaattcgtgttgtcgaaacaattccaatcggttcacttttctctttcaaaagtatatcgaagtaggaatgatgtactcccaactgcggatggaaaaagttctttatcgattttaatatctggtgttgtggaaaaaaacgaaatacgatcaaaattgagaaaattaagaaagaatatgaatatggttttacttattttactacccatgatgtcgttggttaaaaacatgatgttaagggtgaaccgcagcatattggtcgtttttaattaaggaattgaatgactttcaaagatgcacagtaatccttccttaatcaccattttagatttattaatttcaacatacgctctccatgtacttggaatcgaattgagaacttgttatgccacaaatgaatatctttttattgagtaacatcgttaataaagcaaatgcttcacggtattttttgaaatctttgacagtatttgttcagctgggatggatgataatttgacgaggcacattccttatacgcaaacgaaagatacaatttcgctttggcaaaacattgcaaatgttgcaattgtcccaattatatatgcatcattaaatttgcttagcattactttttccttggtagttacattcagtgccaaacaaccgctttaacctttcatacaaaacttttgtgtattcacagaagcatccactgggcgggaaaccatttttcttgtttctgcatgtattcttagaagagatttaagctttcccttgaattttcgaatgttgataaaaacaaaataatagactttggaaaggtgattcaatgaataaacatgaaacgttcaccgtacattaattaagcatccttttcgaccaccctgacttgttctctcatcacatcttgataaccatttacacgagagatttaaatgaagaagaatgaaaaattcactttgacgagtcttggaacccctaacttggaaaggcacagatcatgattgctacaaaagcatttgcactcggtttcagctataggaagtgtgattggtcgtacatgatggattgacattctcgtctatttggatcacatacagaagacaagccaagtcagagcagacaatacgtatgcgattgagacattatttttgtgaaatttatgattcttccacatgtttgaatgatgtagaagatgtacaggaaacttttaatgatgatacgatatcggttcaatcacaattcataagcgaaacgaatgccaaatactaatactatatatccatgaatcatttaccaatagtatttttactgttcgtgaatgctgagaaagtttatgtctaatgtattagctgtgtcaaccatttatagtgtgaagccactttccacttgcaacgctaaggatacctagacgcacaaatacattatgctagtggcacggccaaaattatttactccaaagtctttatcctcttcgtttatatcgctaacaagaaatcgtagtcacaaatgtacatacgttgaaacatttgaacaacgtacaacaagccaataatgacaagaatggagatgaaagtggtgatggttagtggtagtcgtggtagtaatggaagtggtaagtggaagtggtggtggtggtggtagtgcttgtggtaagtggaagtggtagtggtagtggtgctgtgctgatgctggcgccgatactggtgatgatgttgatgcctatactgacactagtactgacactagatgacactagtactggtactaatggtaccattcaacttggcaagtataagacttatgtgtgtaagtggtaaaaaatcaatgagtaaactccactaagaaaatttcacaactccgttgattcttttgagtatacaaacatgaacgttcaagttttacctttgttaattcaattctaattatactggtttgtacttgctaagcatgtcctgttcacttatctaattcgtttcaattgcggcaactctggtccgatttataattcgaaggactgagtttttaccctttggataaagtttttcaacatacttacaatgattatggtctccactcctgacgtaggtccatgtggtaatagaacacaaacttcaaaatctcatcactatattatacttggtacaacatgcaataccgattgtatataccgaatacagtttcctattgcaatgaatgtgatttaatcattttatgggagttttttcattcaaaactgctttaaatctaaaaactcttctttattcttgacactcgtatatgttgtctgatattcctattcgtgtttcaataacgaagtttactttcattcaaataaatagaaccaatcaagtttactagtgcttatttttttcttttttaataaaaagaatgaatattaggtgtatgatatgaatacgtttttgtttgtttgtttgcaaattaaaattaaaaacaacaaaaaattaaagctactgatttaactttgcttattccataacacttcttactcaatctcacataaccgttgcattcattatatagcttagcttcaataaaagtggtcaataaatgtaaaaataagtaattcagccttgctcaattgcaccgtttttccaaatgtcgcatgaacactcaagtaaagatgtgacaaaataaataagaataaaaataaaaataaatttacaaatcagagtttaaacccaatgtattcccaaaaaagagtttatcacaaaccaaacaagatagatatgaaatgaaaagttaaataaataaaaatggatcgaatggttagaattattagatcaaggtaagtttgcttgggaaagattcatgagtatttataataaacatataattctcaaatagcttagtgaagtaatggtgactgagctacaaaggcaaggaaataagtttttaaaaaatttcaaaatgctgttaataaaatatatgtagtaaaattacaaataccaaagacatttcggaaaattcatccttcaaagttcttgttcttccaaacttcggtatactttccacacgatatttatcaattaccatcagacttctaaagagcttaatttactcattttatcgctggtaatcttggtaaaatcagtgtttatatcatttgtgtaaatattgatggttgttaacattttctgaaacaattgctgatatgaaagactattaaaagtcctgtttcaaaaattgagataaagattttggaaaacatagatacatgtacatcatcgcttagcactttgagaaagagataataatagaatcatatttaccccaaactaattcatgggtgattgatgaaaacatcaaccattgtttcatttcataaagcaacactgggtgagcactaaatagacggaaccaaatgatgtgaggttcatgatgggttcatcgtttccattcagtttacacaccatacgaagaggaaaaagaagttattaaaaaagtacaagcgatgccgtcagttggatataaagaaacgagagctagtacgtattaccacaccaccacaatttaacccgattaggcaaacatcaagagtcctgcaaagaccgaatcaatcggtacatgtctcgctgaaaaactttatagttgaatgttgtctccatttcttgtgatatgagtttcaagttttgatcttttttaaaatcgtcatcaatcatttcatcatttcatctttttgtttgtttgtttttttaatttttaaacaatatcgaactttaattactggagttcagccgactggagatgtaaaagtctttatcgttttttgttgacaatcatactcgaaaaaaaagaaatcaaatcagaattgaacacgaagtatgacccgaattgctctagtacacgtgatgtcgtcatggcaagaaattttggtgatgtgggtctactaatccaataatagcgacttccttacttattaagagacttgaaggcagttcaaaatacctgtgtctgctcacatatgcagcttccggaatctgttttcatcctacatattcttacccttctactactcattcactttatgtttaccctagcaaaatgaagtaacattgtttaaaaagaattggtcgatagcatcaagactatcaagcttaaatacattcagtaacgaaattagtcatataaagtctttcgtaatacacaaattttttagcgcacacgttattactgcttaaagctcgtttctcttcatccattttacacaggtagtgtgatcacgaagaattactaataaaacattgaggcgttatgagatctatgtcgcttcgcaaaactgtatcttagtacgacataaagttgcttttggacttgaacgttgactaaataaatgtgttgcctgattgtacatgatatattatcagctttgtcaagggaaaaaccgagaccgaagaaagttaaaactgagagaaattctagatatgctactataagtgctctttgtcatgagagaaacatgattctacgtgtctgattcacgcaaaggatgcatcaatataccttcttttaattacaggatgatgcatttttaatttgttattgttgtgaattctatgtcaactgtttgctaatataggcggcgcagagatatgaaaaccaaaccgtgacaatacacctaagctaaaaggtcaacgcacgcctaaactagcagctcaactcatgattggactaataatttaaaactaaaactaaaacctaaacctattttacaaataaaactcataattaggctaacaaccctacccatcaactaacgacttgacggtatgctattccttcttttttttaaagcttcactaccatcgaaatatatataacagtagtaaaattgtaaacttttatttttataccatagtagtatggctatgattggaaggttgtagtgtcagtcaagttggaaaaactgttggcactttttttctgaatcaatggaattcttatcaaacacatgcaaacgtataaagaagacttgaatagataatctttgaattcaaacaaatcctagtcaactgaacaacgcatctacctcagcagtccttgggaaatgtataaataggcaagcattaaacttttatatataaaaccatcaagatctctatttttaactcggtggtttctttcacaagacttacttcaagaacgacaacacatcctgacagttaattcattaatactaatactatcgaggattctgtcatccaagtggaatgaacatgggcatcaaaggaatgtttcctcaaagtgagaactatagtgttgcaagcgaatacttggtcgcttagaacaaaacgaattactgtcattaggatatgctcaaaagtgtggcgctatatcttgtatctattgctacgttcattcattgatccaacagcatgggtatagaaagaagacgataagcaggagttgcgcaaacgaagttatggagtttcttgcatgcatgcatgttttggcataaagctggtacttcgaaatatgcctatgaaatctctacctgctttgcaccctaaatataacgtgtcgtcttgtagctgcatgtgaattacaacgattgatagatgaaaaacaaatcgacttgttgcccatttcatcgtttcaaacgactggtagtgttgcttgtgtccatatccatgctgtgtccatatccatactatgtccatgtgttttgctttattacacttggtcaaagaaatctatatgatgttctttacgaaacccacaaagtcattagggatatcattcgaacagaagggtatgtatgcaaaatacactacaaggactaagcccaagcaccgtattgtttcagtctcgaagtaattctatgtacccgtgcattggagatgcgtttaattaacatggtgcgattggacttgagtgagctgacagcactgtatgagggtctgtttgccaagattcaggacttgttgaaagagttattacaactacaactataactataactacaactataactacaacgataagaactatcactactctgaagacaacgatgtgttttctcaagatgataacggatctagcttcgccatcaataagtatgagacaaaggagtccatctttgatgaaacatccattttcctgttgtacatttttgcaggacaactagcctgagcacaagagacatggtgtactagaccttgtgcggaatgtctacttcaaaacttgcatctttatatctgatatatagagatatagagatatagagatatagagagaggctgatgatttataaacacaaacgataagacttgtaacatgaagtttatcgaaaaagtcaatctttaaattcctttctgaacctctctgttatgtcagtgcttcggtaccatgcttttagtgcggtcatttaaaggcatagcgatgatagttctaaagttactgtattgatcaattggaagaacatccaaataaaaaaaagcatgcaaaatgctagtattatcagtaactgcaaataaaaaaagataacaaaaatttacaggatcatcgagaagagtagatactgataatattgagatccacagcactcaacaacagtcttggatttatttagccatttgcttaacttactgtctcaacaatattgttgtttggcatcgccataaatatatgacctagaagtaaaattcgtgttgtcgaaacaattccaatcggttcacttttctctttcaaaagtatatcgaagtaggaatgatgtactcccaactgcggatggaaaaagttctttatcgattttaatatctggtgttgtggaaaaaaacgaaatacgatcaaaattgagaaaattaagaaagaatatgaatatggttttacttattttactacccatgatgtcgttggttaaaaacatgatgttaagggtgaaccgcagcatattggtcgtttttaattaaggaattgaatgactttcaaagatgcacagtaatccttccttaatcaccattttagatttattaatttcaacatacgctctccatgtacttggaatcgaattgagaacttgttatgccacaaatgaatatctttttattgagtaacatcgttaataaagcaaatgcttcacggtattttttgaaatctttgacagtatttgttcagctgggatggatgataatttgacgaggcacattccttatacgcaaacgaaagatacaatttcgctttggcaaaacattgcaaatgttgcaattgtcccaattatatatgcatcattaaatttgcttagcattactttttccttggtagttacattcagtgccaaacaaccgctttaacctttcatacaaaacttttgtgtattcacagaagcatccactgggcgggaaaccatttttcttgtttctgcatgtattcttagaagagatttaagctttcccttgaattttcgaatgttgataaaaacaaaataatagactttggaaaggtgattcaatgaataaacatgaaacgttcaccgtacattaattaagcatccttttcgaccaccctgacttgttctctcatcacatcttgataaccatttacacgagagatttaaatgaagaagaatgaaaaattcactttgacgagtcttggaacccctaacttggaaaggcacagatcatgattgctacaaaagcatttgcactcggtttcagctataggaagtgtgattggtcgtacatgatggattgacattctcgtctatttggatcacatacagaagacaagccaagtcagagcagacaatacgtatgcgattgagacattatttttgtgaaatttatgattcttccacatgtttgaatgatgtagaagatgtacaggaaacttttaatgatgatacgatatcggttcaatcacaattcataagcgaaacgaatgccaaatactaatactatatatccatgaatcatttaccaatagtatttttactgttcgtgaatgctgagaaagtttatgtctaatgtattagctgtgtcaaccatttatagtgtgaagccactttccacttgcaacgctaaggatacctagacgcacaaatacattatgctagtggcacggccaaaattatttactccaaagtctttatcctcttcgtttatatcgctaacaagaaatcgtagtcacaaatgtacatacgttgaaacatttgaacaacgtacaacaagccaataatgacaagaatggagatgaaagtggtgatggttagtggtagtcgtggtagtaatggaagtggtaagtggaagtggtggtggtggtggtagtgcttgtggtaagtggaagtggtagtggtagtggtgctgtgctgatgctggcgccgatactggtgatgatgttgatgcctatactgacactagtactgacactagatgacactagtactggtactaatggtaccattcaacttggcaagtataagacttatgtgtgtaagtggtaaaaaatcaatgagtaaactccactaagaaaatttcacaactccgttgattcttttgagtatacaaacatgaacgttcaagttttacctttgttaattcaattctaattatactggtttgtacttgctaagcatgtcctgttcacttatctaattcgtttcaattgcggcaactctggtccgatttataattcgaaggactgagtttttaccctttggataaagtttttcaacatacttacaatgattatggtctccactcctgacgtaggtccatgtggtaatagaacacaaacttcaaaatctcatcactatattatacttggtacaacatgcaataccgattgtatataccgaatacagtttcctattgcaatgaatgtgatttaatcattttatgggagttttttcattcaaaactgctttaaatctaaaaactcttctttattcttgacactcgtatatgttgtctgatattcctattcgtgtttcaataacgaagtttactttcattcaaataaatagaaccaatcaagtttactagtgcttatttttttcttttttaataaaaagaatgaatattaggtgtatgatatgaatacgtttttgtttgtttgtttgcaaattaaaattaaaaacaacaaaaaattaaagctactgatttaactttgcttattccataacacttcttactcaatctcacataaccgttgcattcattatatagcttagcttcaataaaagtggtcaataaatgtaaaaataagtaattcagccttgctcaattgcaccgtttttccaaatgtcgcatgaacactcaagtaaagatgtgacaaaataaataagaataaaaataaaaataaatttacaaatcagagtttaaacccaatgtattcccaaaaaagagtttatcacaaaccaaacaagatagatatgaaatgaaaagttaaataaataaaaatggatcnnnnnnnnnnnnnnnnnnnnnnnnnnnnnnnnnnnnnnnnnnnnnnnnnnnnnnnnnnnnnnnnnnnnnnnnnnnnnnnnnnnnnnnnnnnnnnnnnnnngatcatgattgctacaaaagcatttgcactcggtttcagctataggaagtgtgattggtcgtacatgatggattgacattctcgtctatttggatcacatacagaagacaagccaagtcagagcagacaatacgtatgcgattgagacattatttttgtgaaatttatgattcttccacatgtttgaatgatgtagaagatgtacaggaaacttttaatgatgatacgatatcggttcaatcacaattcataagcgaaacgaatgccaaatactaatactatatatccatgaatcatttaccaatagtatttttactgttcgtgaatgctgagaaagtttatgtctaatgtattagctgtgtcaaccatttatagtgtgaagccactttccacttgcaacgctaaggatacctagacgcacaaatacattatgctagtggcacggccaaaattatttactccaaagtctttatcctcttcgtttatatcgctaacaagaaatcgtagtcacaaatgtacatacgttgaaacatttgaacaacgtacaacaagccaataatgacaagaatggagatgaaagtggtgatggttagtggtagtcgtggtagtaatggaagtggtaagtggaagtggtaagtggaagtggtaagtggaagtggtaagtggaagtggtaagtggaagtggtaagtggaagtggtaagtggaagtggtaagtggaagtggtggtggtggtggtagtgcttgtggtaagtgtaagtggtaagtggaagtggtagtggtagtggtgctgtgctgatgctggcgccgatactggtgatgatgttgatgcctatactgacactagtactgacactagatgacactagtactggtactaatggtaccattcaacttggcaagtataagacttatgtgtgtaagtggtaaaaaatcaatgagtaaactccactaagaaaatttcacaactccgttgattcttttgagtatacaaacatgaacgttcaagttttacctttgttaattcaattctaattatactggtttgtacttgctaagcatgtcctgttcacttatctaattcgtttcaattgcggcaactctggtccgatttataattcgaaggactgagtttttaccctttggataaagtttttcaacatacttacaatgattatggtctccactcctgacgtaggtccatgtggtaatagaacacaaacttcaaaatctcatcactatattatacttggtacaacatgcaataccgattgtatataccgaatacagtttcctattgcaatgaatgtgatttaatcattttatgggagttttttcattcaaaactgctttaaatctaaaaactcttctttattcttgacactcgtatatgttgtctgatattcctattcgtgtttcaataacgaagtttactttcattcaaataaatagaaccaatcaagtttactagtgcttatttttttcttttttaataaaaagaatgaatattaggtgtatgatatgaatacgtttttgtttgtttgtttgcaaattaaaattaaaaacaacaaaaaattaaagctactgatttaactttgcttattccataacacttcttactcaatctcacataaccgttgcattcattatatagcttagcttcaataaaagtggtcaataaatgtaaaaataagtaattcagccttgctcaattgcaccgtttttccaaatgtcgcatgaacactcaagtaaagatgtgacaaaataaataagaataaaaataaaaataaatttacaaatcagagtttaaacccaatgtattcccaaaaaagagtttatcacaaaccaaacaagatagatatgaaatgaaaagttaaataaataaaaatggatcgaatggttagaattattagatcaaggtaagtttgcttgggaaagattcatgagtatttataataaacatataattctcaaatagcttagtgaagtaatggtgactgagctacaaaggcaaggaaataagtttttaaaaaatttcaaaatgctgttaataaaatatatgtagtaaaattacaaataccaaagacatttcggaaaattcatccttcaaagttcttgttcttccaaacttcggtatactttccacacgatatttatcaattaccattagacttctaaagagcttaatttactcattttatcgctggtaatcttggtaaaatcagtgtttatatcatttgtgtaaatattgatggttgttaacattttctgaaacaattgctgatatgaaagactattaaaagtcctgtttcaaaaattgagataaagattttggaaaacatagatacatgtacatcatcgcttagcactttgagaaagagataataatagaatcatatttaccccaaactaattcatgggtgattgatgaaaacatcaaccattgtttcatttcataaagcaacactgggtgagcactaaatagacggaaccaaatgatgtgaggttcatgatgggttcatcgtttccattcagtttacacaccatacgaagaggaaaaagaagttattaaaaaagtacaagcgatgccgtcagttggatataaagaaacgagagctagtacgtattaccacaccaccacaatttaacccgattaggcaaacatcaagagtcctgcaaagaccgaatcaatcggtacatgtctcgctgaaaaactttatagttgaatgttgtctccatttcttgtgatatgagtttcaagttttgatcttttttaaaatcgtcatcaatcatttcatcatttcatctttttgtttgtttgtttttttaatttttaaacaatatcgaactttaattactggagttcagccgactggagatgtaaaagtctttatcgttttttgttgacaatcatactcgaaaaaaaagaaatcaaatcagaattgaacacgaagtatgacccgaattgctctagtacacgtgatgtcgtcatggcaagaaattttggtgatgtgggtctactaatccaataatagcgacttccttacttattaagagacttgaaggcagttcaaaatacctgtgtctgctcacatatgcagcttccggaatctgttttcatcctacatattcttacccttctactactcattcactttatgtttaccctagcaaaatgaagtaacattgtttaaaaagaattggtcgaaagcatcaagactatcaagcttaaatacattcagtaacgaaattagtcatataaagtctttcgtaatacacaaattttttagcgcacacgttattcctgcttaaagctcgtttctcttcatccattttacacagatagtgtgatcacgaagaattactaataaaacattgaggcgttatgagatctatgtcgcttcgcaaaaccgtatcttagtacgacataaagttgcttttggacttgaacgttgactaaataaatgtgttgcctgattgtacatgatatattatcagctttgtcaagggaaaaaccgagaccgaagaaagttaaaactgagagaaattctagatatgctactataagtgctctttgtcatgagagaaacatgattctacgtgtctgattcacgcaaaggatgcatcaatataccttcttttaattacaggatgatgcatttttaatttgttattgttgtgaattctatgtcaactgtttgctaatataggcggcgcagagatatgaaaaccaaaccgtgacaatacacctaagctaaaaggtcaacgcacgcctaaactagcagctcaactcatgattggactaataatttaaaactaaaactaaaacctaaacctattttacaaataaaactcataattaggctaacaaccctacccatcaactaacgacttgacggtatgctattccttcttttttttaaagcttcactaccatcgaaatatatataacagtagtaaaattgtaaacttttatttttataccatagtagtatggctatgattggaaggttgtagtgtcagtcaagttggaaaaactgttggcactttttttctgaatcaatggaattcttatcaaacacatgcaaacgtataaagaagacttgaatagataatctttgaattcaaacaaatcctagtcaactgaacaacgcatctacctcagcagtccttgggaaatgtataaataggcaagcattaaacttttatatataaaaccatcaagatctctatttttaactcggtggtttctttcacaagacttacttcaagaacgacaacacatcctgacagttaattcattaatactaatactatcgaggattctgtcatccaagtggaatgaacatgggcatcaaaggaatgtttcctcaaagtgagaactatagtgttgcaagcgaatacttggtcgcttagaacaaaacgaattactgtcattaggatatgctcaaaagtgtggcgctatatcttgtatctattgctacgttcattcattgatccaacagcatgggtatagaaagaagacgataagcaggagttgcgcaaacgaagttatggagtttcttgcatgcatgcatgttttggcataaagctggtacttcgaaatatgcctatgaaatctctacctgctttgcaccctaaatataacgtgtcgtcttgtagctgcatgtgaattacaacgattgatagatgaaaaacaaatcgacttgttgcccatttcatcgtttcaaacgactggtagtgttgcttgtgtccatatccatgctgtgtccatatccatactatgtccgtgtgttttgctttattacacttggtcaaagaaatctatatgatgttctttacgaaacccacaaagtcattagggatatcattcgaacagaagggtatgtatgcaaaatacactacaaggactaagcccaagcaccgtattgtttcagtctcgaagtaattctatgtacccgtgcattggagatgcgtttaattaacatggtgcgattggacttgagtgagctgacagcactgtatgagggtctgtttgccaagattcaggacttgttgaaagagttattacaactacaactataactataactacaactataactacaacgataagaactatcactactctgaagacaacgatgtgttttctcaagatgataacggatctagcttcgccatcaataagtatgagacaaaggagtccatctttgatgaaacatccattttcctgttgtacatttttgcaggacaactagcctgagcacaagagacatggtgtactagaccttgtgcggaatgtctacttcaaaacttgcatctttatatctgatatatagagatatagagatatagagatatagagagaggctgatgatttataaacacaaacgataagacttgtaacatgaagtttgtcgaaaaagtcaatctttaaattcctttctgaacctctctgttatgtcagtgcttcggtattatgctttaatgcagtcacttgaggcgttgtcctaataggtgcaaagttaccgtatatttaggtttcatgtttgtgattactggagaacgactgtgaagagaccaaccgtatcgtgttttttccaattgtgatcttccaatgcttaataaatacgaaatcttatttcgatttacaggctgggcattcacgaaacatagcgtttttacatttctacaggcacactataaacaacttgcaatatctgccatcactttatttctccaactttgttcaagttaaaagtggcagaaagtgtttcccgatatgagataacccaacgcatatgttgttgcaaaaactaaacgcccattcatcaagcgagtcgagatgagaggaatcattgtataaaaggctagcatgtaaaagctggaagaaggaaagaacacgggatatgtaatggaacatgggaaattgatatggacattgatatggacattgatatgaacatgaatatgaacatgaatatgaacatgaatatggtatagagaactacatcgacacagaaaagaaaacaaaagttgctaaaatgacaaaggtgccgaatcaacaggccatagtaccgatggaatccaaatacaatccaagaatcattcaaacatcgcaaacatctttgctcgacattgttgttttgaacaactactaagagttgcaaatgtgaaagcaacaacattcaacgtatctacaaatttctcgctgttttgcatatacatttctatttaatagtgaattagcgtataagaaagaaatggagcttttttggattacaagtgataagagtaggtgtaggagtaggactcatttattgaatctggtgatttgcgtcggaaggttgagaatataaagagcgtgtgaaactaagccatgtaatctaaaactttaccgaaactttcagatctcgcctatttaccgatccaattgctagtgcagtaatagttgcttgaattttcaccggatgaatcttctcttgaataaaaccgccaataagagctagtcaagttgactactgaaaatatacgatattgaagatggcgtatgtagtgcttgtaatggtctggtggatggtggaagctttccactcttacttagcattcagtattacacaaatggattaaggagaagcggtaaacgatttcatgaggttcgtttattataatgggttgagtgacacgattcaaattgagtcaaaatatttttcgaagataatccgccaattttctataactcatatattaatgcattcgttcaaatgatattaatacatacgtgtaaataagggacaaataggtataaaaaacacggcgataagaaatggaattaatattttgcaacatgacaactagacattatttcgtccgtaaactttaatagtccacgacaacaaagcgacaatagcagtcgtttattatttggtcttcattatgtcaacaagctatttgaagggatttatgtaaagtatgtatttacatttgatcattagactatttgctttggaagaatgatagtgataataatgataatgataataataataataataataataataatatgtttttttattctcctacaactatttcatatcgtcaatcttcaaatttttcaacatgattggataatgattacttataaaatatatatatatatatatatacattcattatatacattatatacattatacttgaacaccccaattggctatataattagagtcagtattttgctaaacttttatatcgcgaacatcagcattacttgtatacttactaaaaattcataaacaatttggtaattaatcattgaaaataataaagttaatgctttgtatatacattctaacagtctaaagtagagattggaagagaaaaagttaaagattgaatgagtgtttagtcaaattgatcgacattattgaaaaccaagagaaatcgatcgagctaaataacattgagcacttgaataattataatttagacggaaaaataaatagtttccgaacaacatggagacatatgtccttgactttttaatctgagaaatgttcaaatagattaaacctctagtatatccttaccatgacagccaaaataaatacaaattaaagtgattaatgtcctcttaaagtttttttatatttacaaaattaaatgattatttagcttgtccaattctaaccactctattacgatttttactacaataattcgctccattataactcattgctgagaatgacagttgctgatgatgtcgcttatgttttagtcctattaccatgataatacaaaaatatcgtttagcgccattaattcctggtttatggcaagtagcgttatcgtttttatcgattatacctaaaatcatacaatgcagaaataaaatgttctttgaatgttagttatttgcttcttcgtcaatttatgggacttttagcgttgctagaagtcaataacatagtataaagcgtatcgccttagtaaattaaaccccaactttacttctcttttcttttctttgtgaaataacctttcaatacgcctttgttaaagtgattcatagtcagttaggctagcgatattgcaagctgttgaaaatgcaagcggattgataaattcttgttaatacgctgaaatgtgtaactatattgactgacatcatcgacatcaattcactaagtttaaactttccgtctcctttgttgccgcacttgatgtaatgtgcatacggtaactgtaatcgatttattcggcaacattgttattctaagctaattcagctctaattgtccgtgagtgagcgagaagatagcaccatcaaaggtagatcggtaatgtatgcatgataaacccaagtgagtatggcgagtgagattgcaaacatttgaagcaatcacaacctcaatcaatgaaaagctagtaatctttgaaaaaatatatatatatatttatatgttttagtctgtttccaaaataatatatatatgttttcaactattcgacaacgtaagtcatcggttaactaattatgtattttacacattcatgtaaattatagcatctttactttgttatcaaagtgagtcaaattgacgcaaataggtggtaaaaagtttggtaaatagagaacattgcgcaagcaaacttaaggtgtgataaaaaaagatatgtcagttagtttattgaactaaaattgaaccaagatgaatgagacaaagttaacgataattgataactataaacaaaatttattattattattttttttttgacttgcgaaagaaaaagtaaatgaaacaccagcaagagtatttgagctacataaaataaatgagtgttaaaacggatattaaacgagttgtacgagattaaagcaaagacagctgaaaagaaatatattaaagatagttatttaatagaggtttaaatatagttagtcttataattaggttagttgatggagaaaatcaaacaaatctcctttagtataggggtagtacacaagcctgtcacgcttgcagcccgggttcgaatcccggagggagaggattcttttacgatttttccacatgtttttgttttgtgactttacttaaccaaaataccaaaaattttgatttagtgcaaaaaagatcgatcccgccaggagtcgaacctggaatctcttgatccgtagtcaagcgccttaaccattgggccacgagacctgttaatacatgcattcaaacaaaactatttgtacaaatctgttattggcaaaaattttaaattagcaatggtggagagcacccattgacaataaagtttaagcagtttaggcttcctaaaactagctttgattatacattcaagacttgtatgactggctttatacaggtagcagactgagcagtagacggttcacttcttttaataaattttctaattttacacaacttgaattaatttgcatagattttttattactcaacgaggtcgtgtggtttagatggttataatttctgcttaacatttacagttcgcagacggtcccaagttcgagtcttggcacgatcatctttttatcataatttattacatttataattatgatatgtataataaattaaaaatgaaaaaaattgctccagcagtgacttgaacactgggcctcttgcttactaggcaagcgctctaccactgagctacaagagctgctgtttgtcttcgtaaattaacgttatctatatttaaaagcataatcctggaaacatgatcaatggtcataagtctgcacttcataactcccaacgtctttgaagagaccaagcaacgcgagagagaatatctcgaggagcaccagaaaaatactggcaatgtccttggtggttacaaagcaatcgtggataaccctaatgtctctgatgaagctaaacaacatgccaagaggattaggaaaccttattacacacaaaccgtaaataataacatcaatatttgtcacgctaattattacctacttgcgattaaaactttttcagtctatacttgtaggttgtgaacctatttaatttcgcatattgaaaatgttatgcctttaaatattgaattcatacttttactctgtcgcgcgttatctgagctcttttaattgaatatatttcaattgcaatatagataaaattgttatctgacatagtgtacctaccatatttataactttaatcacatttccctatactttttaccttaattatgaaatctaacatttgaaattatttttctatattaagtggcaaaaaatttttttctaaattgatatgcccgtgtagtctatatttctcacactgattcattacttaatatcgctaatttttttatataggaagataattacaaagaaaaaagtttttgcaccatcctttgacgcgtctatgctatagcgcctgtaatataaatcttataataacgtcaaatggtgccatttccaagtctcttttgatgcttaaaggtaaaaaaccttgattgaagagtgggaaaactcgttttttttaacagtaaaatctagctcattatcctaatatgtaacaccaactaatctacaaaaaaaaaaaaaaggaatatatttggtcatttaaacaagtgtgtattgccttaaattaactagcgaccaaatttgcaaacaagttgtttaaagcaaaaaccgagtttgggctgcaaaaaagttaaagacttttgaagtgcttcattccatattaagcaaaaatatgacaaaattgaagacaattaacgtcagcgttcatgaaatttctttattggcttgagtatttgccatttgtcaacaataaccaaaatactgtcacacaaaaccctttgctttgataactgaacagcggaacctaataatatatctctgtatgttcatcaggatgctaccttaaaaaatctctaaacgttcgaagtgagtccaaaacgaaacattaattctaatatcattagtaatcgttttgtggaaagaattagtattacttgtcctaaggatagctagtgacttatcttctaaaaatagcattgagtagctgaaactacatcttaaatcaagtaccatcattacgcagtcatatacgatttcaaaaaatacacgtacttcattgtttgacttctgagtgtaatccatttatttattttgctgtttgaactttgcaggttctacatcaaacttttatgttggtttattaactcactcactcaccactagttaatatgcacgcaaagtcgttttcttcagtttttgctaaactatttatttaaattaaagaggaagcagccactagccatttatcagttttaatattacttaaggggtgaaaaggctttactacatattgatcttacattagactaatttaatcggttatttaaataattggcaatgttgaattagtacaatatttatgaatatatccgcattttatttttcctgtaccttatgtctatggttaaattgatgtaaaaatttttaataatataggaattacaagtaggatatttttactttggttcattaaatatgtttccctacttttgtttactaataatactccgaatttttgcaaccataatgaggttgacttcaaagtatttttgtagtcttttcattatagcatcgaatatttggtgcaaaatgaatatattgcacgttcttactggtagttgctgttggtatttgtcaacatgttcagattttgtactgttttcccatgtctgcagcgtgttttcttaaatttataaaaatgaatttattttagtattattcaaatgttgttactaatttaactataaacgtaaatgtatgagatttctctagtattgcaagatcaaactttatgtaaagtaaaaagtggacgtttacatatataacgttaaaatatgtgaaaaattacgttgtttgttaatgcctgtcattctttagcttacttgctactcaagagttatatgggggctttatagtaattgtttctattgagtttaagtaataatatcacttcgaatcttataacaagtgagtgtaaatctgtaattgaatttatttgatagaaggagactaagtgttttttttttttttttttttagtatttccgttgtaaagcaaacgatttgaaaagacgtaaagagatataaacggttcattgtactgtgtaactattttttgtcaaacctttgcttgcattatatcttcattgggaaacttttggttttgtgtggaagaattatatccttttataatgataatacattagttcaattgtcaacgtatagatataatgaaaggggtacggcatatatatattttttttaactaacaaatagaatcgtaattataaccattttctaattttcctatacaaacccctgatcgttacaattattgatttttttttaatacattcaaatattctaaggtttacgtgtaagcgtagagaaacaattgttaattaatagcgccaaaaaataaaaaaggaaagcgtattgaaagataggaacgataccgatgaatcaaaagtaaaggacagataaagcggagacgtaataaataaaagtacctcttgtatgtaaaaacatgtacaataaaatagtaaaaatggtgaccagtgagggattcgaaccctcgcatctttcgatacagcaagactatcgtccaagtattacttgagtgctgcgccatagaccgctcggccaactggccatgttgttattcgtgtgtcatatataagcatattattcttacttcgcaaaaaataatttgatttaagctcacctattattctgatgtaaatatttattagtcattagtaaagatatatacaacttttgcttacaaaatccttaatgaaatctaggttttttattacataatgtatatacataaaaatcaaccaatacttggtaaatatttgattcagccttttctgcaatttattttgtatacttaattgaacaagctaagctatatctatatttgattagacaattgagtttcaataaaatggtatttgatagaacaatttattaatatcttattaaacttaaggttaattaaacccacgtttctcaaatgaatttaaataacacacacatagacaatgggagataatttaatatctactttgcttacatcggaagatggcatattttattgtaattaaatcaaatatgcgtttggagagacatcgcatagtttatgttctcaagttcaaataatactgatttttctaagagggaaagctttgtacttcaaaagttttgatgctcaacaaatggccagagtatttcaatctatactttttaagtaaattaccaaaaaacacttcttttggataaaggcaaaactaactacattaaataaagacgtaagaggctatgtttcgcaactattttgtgtatatttgttatacgctgtcatcattacccattatcactgtacatttggaaatctcagatgtaataattcaaatcaaatgcttttctttcatcgatatatttttacaatattgtaaaaaacatatgaatttggcgcactaaattataacaattttcttttctttaaatctaattatcagacgatctaaatttagtcacgaaatttattttggttgttaaatacccatttgtgcagaatattattttttttcttgaaaagggtagaaagagaatcagttaaattttgctaatcgtttgttgcggtttgcttgcattgtgattgagtacctatatgtaaccagattaacctctgataatgcactgtttttttaaccacaagtcttgtcatgaagttataagcacacagatgtcgaaatttcaatgtaattttaatagaagatataattagctcgttaattaagatctaattcttttcacaattctggtatcaaaaagttatgttctgagtttaaagggctgcatccttatgatttttcccattgttcaatacttcttttttttttttttaaccaaaaatgatatgtatattttgaacactaacaaaaaaaaatataagttctccgtcagggggaatcgaacccccgccgcatcggtgagagcgatgaatcctagccactggaccatgacggatttttaaaaaatgtatttttatgttttatatgtgcacacagagtattatgctaaatgaaactttattgccataccttttgtgcacccagctattcaactcatttcatcaatcaaatcacttatgtgacgacaaagacctgaaataaagatattccattctatctctcaaaggtggtggcgacctgttattttactacgtctatgtcttcaggttcttgggtttcttatacttacgtaaatttaaatcatcagaaaaattaaagatagctgcttgcagccaaaagaactgtgactacattttttaagaaaaattaatttggccaacattagcattcatttgcgaacctgaatatacaataatttgtcagattgtggtcataacagtggcttgcgattaggaacctcaatgaatttcaaattcaggatgctttcagttgattttataactttggctactctgctttaattttaaacgttctgttttggaatatgctttttcgacgctttttttaaaaaagcagcaatagtcatactagtcactaaattatctaaatactcaattcaaatttgcttactttgttgtcggttaatagaacaattttttcgtttcgacggtttaaagcagcagaatatattctgaaaacttttctcagtgtaaaatgctctccgcgcggaagtatttttattaatctcttatctgggaaattttgcatgcttgaaatcattaaatatttgtttatcgtttattgagtctaatgagctacaaataaattgaagtgtgtttacaaaatacatacaacatagaaacaaagaaaacttaccgggttccttagatttgagtcatgcatgtcaaaaaaatttaaaagaatagaacgtaaaaaattaaagttatagatgttgtatgatacttaatatttcagctagaatagaacagatacccaactgttttaataaagtacaatgtaaacaattatcattttgaataagcaatatagtcataaaacgaaattttcatcattcgtaaatataaatatataaccaaatatcttttcaaaattcaaccaaatttagtggaacatatacaaaaataaagaggctttcgtcgttgtaataaaaaaaaggaaagctaaaatgtaatttttttgatggagtagttgtaattttaaatcttttagtgcaaaaagaagcatgagtaaaatagcattcgataatttgagctttaatgcataaagtactttggaaaaattactttttttattaccgaacaatatttttataatgtttcactattttttttgcatctgcaacgggatcagaagaacggccttacattcacattttgaattgcaagttattatattatatcttactctctaatgaagttccataaaccacaattcctcctgtattatgaataaagatacgaaatttaaattcaactacacgttgtaaaacatatttaattcatgaactaaaagtaatcaatacttgataaaattggatttaattagaaaagtttgacagagtatatgtcaattcataacgataaacaataaacacgaatgcctctttcattttactaaaattaaaaaaaggccggctcatttatagtattaatcaacgaagaaatttatatatcacaaccataaagccgtattctaaacattgtttaataaatttgatttaaaggtttaattaaagggatttcaatcgccttgaaatgctataacaaaactttcatatgtttaacaacggggttaaacaaatctttttgaagtcatcatttactttttattttttcgtatggtaaaaaacatttaccctttttaacattcagcaagttttattgatttcttatgaaccagaattttccagacaatcgcatggtactatcaaaacatataaaaaatgaatgttataacgtctagtaagaaatacttaaaaaggagcagaatcttcaaaaaaaatgttcatgaaatacacaccactcacttacgcttcacctagtttccaaaaacatggaatgtttgtcttagcaaaaaaggaaatgaatttgattttcccattaaccgaaatagaaacgtagaaataaaaatgaatccaaaagtcgcacacattcttgaattaaagaaattaaccagagttttcgaatccgcatggaaaatacgaatgtaatctaattaacaacaacctaatgagataattctataaatagagaaatttgcaaaatttaacaattctggctttaagaaaaataaaatcactgcataaatggaatactgttgaaataaaaacagcagttatagagaaattagtcaagtactgttcacttaagtattcaaccgttgcaacttacatcagcatactggaaaataattctctgtaacaggaattttttaaaactaaatagcatctcattgctatttggcgaccggcggcgttataaactaagcaattgaccatctttcgtaaaatattaaaaaaaaaaaataaaaataaactttcgttatacatagaaaaccaaaagaagtgtaaagtaacagatatgtttcgcaatataattcatagtgtggatacttttagtcatttgcatatataactaaaagaacttcagaaggtattagtggtcggttttctttttgttggtaatgtctgaagcatttcgccgaaggaaacgccatggagtacacgcataaaacaacaaccactgaaagcgaatctgtattgttctggttctgtactacttttgttggttatacttgatataaagcacagcaaacttacagaattgattaattaaactaaaagccaaatacattttatattgtataaagactttcttaacgcaatagagtcataatatttattttcgccggtaacaaaaggatcaaattaataaaggaaaaggtttcaacgaaaaataaataaaactaaacgttgagctaattaaacacttatttacatgattatgctgaaatacgccataatttaaactaaaagtacaccgcaaagatcgaacgagttgtctaatgcaatggttacaaaatgaattgtcgaatatatttttattactcgaaagtaacttacgtgatttcaaaaaaatttgtgaacaacctaaaaacaaatattccttaactcatcatgcattaaacgtttgtaaaatatcattagcccgtttatggaatttcaaaagtttctccattgtagtttgctaaccttttttctacaattaacaacatacattacaagttggagaagtataaacagcaaaaatgtacaagcgtatttcactagaggcttatgaatcttaatatttctgtatttttgcttaaaatcgccatttgtttttatttttgtcatataaagatagcttaagtaatgaaatatctattgaacaaaatagtaagcgttagtgtcaacttcaatccatgaatcaaaagataaaccagtatcaatagcagaaataaacaactgttagcgaaaccatgtgagcatgtaaaataatttatagaaacaccaataatttatttctaacaagattgttttatctattatttatattacgacagtcaaaactcatttaacaatttaagtaaaaaaagatctcctagaatgttaaaaattgtaaacaatatcaggaacgaaaagagcaagcagccttaattacatgctaagactaaatgagtagtaagcattgaattgttttgaaacatgagcaaagtttatttgtaagaatttcacgtagcatttcaatactgcaatttcaagtttcaaagaaaaaaaatatatatggtctcgttaacttcagcagctttgaaatatgtaaattttgtattgtagtttctaaattacttcgaacgaataattaaagctttctattgttttataaaactcaacaagtatttttttttactctttaaaccggtacgagaatttttgatttatttatttattttgtttcattgttacaccgtaaatgataatttcaacccgtagtttcattcgtttatgatggatgaaatcccaaattaattagagtattatcgtaactatccgaaagtagtcggaattagaaagattgatgatttgtatgaaccttttgaataaattttaggtagaacaacattaaaataaggtcaagactagacaaaattaattgcttaaaaactttcaaacacgtctacaaagctttgatttgaacatgcacaatccataagtatgaagaataaaaaatttaaacataaataataaataaaccaaatccaacactttgattgttattattattcaaaattaaaaaaaagaaagaccttgaacgattaaaaataaatacacctctataaaaaccaatccatttaagtcgtctgataattagatttaaagaaaagaaaattgttataatttagtgcgccaaattcatatgttttttacaatattgtaaaaatatatcgatgaaagaaaagcatttgatttgaattattacatctgagatttccaaatgtacagtgataatgggtaatgatgacagcgtataacaaatatacacaaaatagttgcgaaacatagcctcttacgtctttatttaatgtagttagttttgcctttatccaaaagaagtgttttttggtaatttacttaaaaagtatagattgaaatactctggccatttgttgagcatcaaaacttttgaagtacaaagctttccctcttagaaaaatcagtattatttgaacttgagaacataaactatgcgatgtctctccaaacgcatatttgatttaattacaataaaatatgccatcttccgatgtaagcaaagtagatattaaattatctcccattgtctatgtgtgtgttatttaaattcatttgagaaacgtgggtttaattaaccttaagtttaataagatattaataaattgttctatcaaataccattttattgaaactcaattgtctaatcaaatatagatatagcttagcttgttcaattaagtatacaaaataaattgcagaaaaggctgaatcaaatatttaccaagtattggttgatttttatgtatatacattatgtaataaaaaacctagatttcattaaggattttgtaagcaaaagttgtatatatctttactaatgactaataaatatttacatcagaataataggtgagcttaaatcaaattattttttgcgaagtaagaataatatgcttatatatgacacacgaataacaacatggccagttggccgagcggtctatggcgcagcactcaagtaatacttggacgatagtcttgctgtatcgaaagatgcgagggttcgaatccctcactggtcaccatttttactattttattgtacatgtttttacatacaagaggtacttttatttattacgtctccgctttatctgtcctttacttttgattcatcggtatcgttcctatctttcaatacgctttccttttttattttttggcgctattaattaacaattgtttctctacgcttacacgtaaaccttagaatatttgaatgtattaaaaaaaaatcaataattgtaacgatcaggggtttgtataggaaaattagaaaatggttataattacgattctatttgttagttaaaaaaaatatatatatgccgtacccctttcattatatctatacgttgacaattgaactaatgtattatcattataaaaggatataattcttccacacaaaaccaaaagtttcccaatgaagatataatgcaagcaaaggtttgacaaaaaatagttacacagtacaatgaaccgtttatatctctttacgtcttttcaaatcgtttgctttacaacggaaatactaaaaaaaaaaaaaaaaaaaacacttagtctccttctatcaaataaattcaattacagatttacactcacttgttataagattcgaagtgatattattacttaaactcaatagaaacaattactataaagcccccatataactcttgagtagcaagtaagctaaagaatgacaggcattaacaaacaacgtaatttttcacatattttaacgttatatatgtaaacgtccactttttactttacataaagtttgatcttgcaatactagagaaatctcatacatttacgtttatagttaaattagtaacaacatttgaataatactaaaataaattcatttttataaatttaagaaaacacgctgcagacatgggaaaacagtacaaaatctgaacatgttgacaaataccaacagcaactaccagtaagaacgtgcaatatattcattttgcaccaaatattcgatgctataatgaaaagactacaaaaatactttgaagtcaacctcattatggttgcaaaaattcggagtattattagtaaacaaaagtagggaaacatatttaatgaaccaaagtaaaaatatcctacttgtaattcctatattattaaaaatttttacatcaatttaaccatagacataaggtacaggaaaaataaaatgcggatatattcataaatattgtactaattcaacattgccaattatttaaataaccgattaaattagtctaatgtaagatcaatatgtagtaaagccttttcaccccttaagtaatattaaaactgataaatggctagtggctgcttcctctttaatttaaataaatagtttagcaaaaactgaagaaaacgactttgcgtgcatattaactagtggtgagtgagtgagttaataaaccaacataaaagtttgatgtagaacctgcaaagttcaaacagcaaaataaataaatggattacactcagaagtcaaacaatgaagtacgtgtattttttgaaatcgtatatgactgcgtaatgatggtacttgatttaagatgtagtttcagctactcaatgctatttttagaagataagtcactagctatccttaggacaagtaatactaattctttccacaaaacgattactaatgatattagaattaatgtttcgttttggactcacttcgaacgtttagagattttttaaggtagcatcctgatgaacatacagagatatattattaggttccgctgttcagttatcaaagcaaagggttttgtgtgacagtattttggttattgttgacaaatggcaaatactcaagccaataaagaaatttcatgaacgctgacgttaattgtcttcaattttgtcatatttttgcttaatatggaatgaagcacttcaaaagtctttaacttttttgcagcccaaactcggtttttgctttaaacaacttgtttgcaaatttggtcgctagttaatttaaggcaatacacacttgtttaaatgaccaaatatattccttttttttttttttgtagattagttggtgttacatattaggataatgagctagattttactgttaaaaaaaacgagttttcccactcttcaatcaaggttttttacctttaagcatcaaaagagacttggaaatggcaccatttgacgttattataagatttatattacaggcgctatagcatagacgcgtcaaaggatggtgcaaaaacttttttctttgtaattatcttcctatataaaaaaattagcgatattaagtaatgaatcagtgtgagaaatatagactacacgggcatatcaatttagaaaaaaattttttgccacttaatatagaaaaataatttcaaatgttagatttcataattaaggtaaaaagtatagggaaatgtgattaaagttataaatatggtaggtacactatgtcagataacaattttatctatattgcaattgaaatatattcaattaaaagagctcagataacgcgcgacagagtaaaagtatgaattcaatatttaaaggcataacattttcaatatgcgaaattaaataggttcacaacctacaagtatagactgaaaaagttttaatcgcaagtaggtaataattagcgtgacaaatattgatgttattatttacggtttgtgtgtaataaggtttcctaatcctcttggcatgttgtttagcttcatcagagacattagggttatccacgattgctttgtaaccaccaaggacattgccagtatttttctggtgctcctcgagatattctctctcgcgttgcttggtctcttcaaagacgttgggagttatgaagtgcagacttatgaccattgatcatgtttccaggattatgcttttaaatatagataacgttaatttacgaagacaaacagcagctcttgtagctcagtggtagagcgcttgcctagtaagcaagaggcccagtgttcaagtcactgctggagcaatttttttcatttttaatttattatacatatcataattataaatgtaataaattatgataaaaagatgatcgtgccaagactcgaacttgggaccgtctgcgaactgtaaatgttaagcagaaattataaccatctaaaccacacgacctcgttgagtaataaaaaatctatgcaaattaattcaagttgtgtaaaattagaaaatttattaaaagaagtgaaccgtctactgctcagtctgctacctgtataaagccagtcatacaagtcttgaatgtataatcaaagctagttttaggaagcctaaactgcttaaactttattgtcaatgggtgctctccaccattgctaatttaaaatttttgccaataacagatttgtacaaatagttttgtttgaatgcatgtattaacaggtctcgtggcccaatggttaaggcgcttgactacggatcaagagattccaggttcgactcctggcgggatcgatcttttttgcactaaatcaaaatttttggtattttggttaagtaaagtcacaaaacaaaaacatgtggaaaaatcgtaaaagaatcctctccctccgggattcgaacccgggctgcaagcgtgacaggcttgtgtactacccctatactaaaggagatttgtttgattttctccatcaactaacctaattataagactaactatatttaaacctctattaaataactatctttaatatatttcttttcagctgtctttgctttaatctcgtacaactcgtttaatatccgttttaacactcatttattttatgtagctcaaatactcttgctggtgtttcatttactttttctttcgcaagtcaaaaaaaaaataataataataaattttgtttatagttatcaattatcgttaactttgtctcattcatcttggttcaattttagttcaataaactaactgacatatctttttttatcacaccttaagtttgcttgcgcaatgttctctatttaccaaactttttaccacctatttgcgtcaatttgactcactttgataacaaagtaaagatgctataatttacatgaatgtgtaaaatacataattagttaaccgatgacttacgttgtcgaatagttgaaaacatatatatattattttggaaacagactaaaacatataaatatatatatatattttttcaaagattactagcttttcattgattgaggttgtgattgcttcaaatgtttgcaatctcactcgccatactcacttgggtttatcatgcatacattaccgatctacctttgatggtgctatcttctcgctcactcacggacaattagagctgaattagcttagaataacaatgttgccgaataaatcgattacagttaccgtatgcacattacatcaagtgcggcaacaaaggagacggaaagtttaaacttagtgaattgatgtcgatgatgtcagtcaatatagttacacatttcagcgtattaacaagaatttatcaatccgcttgcattttcaacagcttgcaatatcgctagcctaactgactatgaatcactttaacaaaggcgtattgaaaggttatttcacaaagaaaagaaaagagaagtaaagttggggtttaatttactaaggcgatacgctttatactatgttattgacttctagcaacgctaaaagtcccataaattgacgaagaagcaaataactaacattcaaagaacattttatttctgcattgtatgattttaggtataatcgataaaaacgataacgctacttgccataaaccaggaattaatggcgctaaacgatatttttgtattatcatggtaataggactaaaacataagcgacatcatcagcaactgtcattctcagcaatgagttataatggagcgaattattgtagtaaaaatcgtaatagagtggttagaattggacaagctaaataatcatttaattttgtaaatataaaaaaactttaagaggacattaatcactttaatttgtatttattttggctgtcatggtaaggatatactagaggtttaatctatttgaacatttctcagattaaaaagtcaaggacatatgtctccatgttgttcggaaactatttatttttccgtctaaattataattattcaagtgctcaatgttatttagctcgatcgatttctcttggttttcaataatgtcgatcaatttgactaaacactcattcaatctttaactttttctcttccaatctctactttagactgttagaatgtatatacaaagcattaactttattattttcaatgattaattaccaaattgtttatgaatttttagtaagtatacaagtaatgctgatgttcgcgatataaaagtttagcaaaatactgactctaattatatagccaattggggtgttcaagtataatgtatataatgtatataataaatgtatatatatatatatatatattttataagtaatcattatccaatcatgttgaaaaatttgaagattgacgatatgaaatagttgtaggagaataaaaaaacatattattattattattatcactatcattcttccaaagtaaatacatactttacataaatcccttcaaatagcttgttgacataatgaagaccaaataataaacgactgctattgtcgctttgttgtcgtggactattaaagtttacggacgaaataatgtctagttgtcatgttgcaaaatattaattccatttcttatcgccgtgttttttatacctatttgtcccttatttacacgtatgtattaatatcatttgaacgaatgcattaatatatgagttacagaaaattggcggattatcttcgaaaaatattttgactcaatttgaatcgtgtcactcaacccattataataaacgaacctcataaaatcgtttaccgcttctccttaatccatttgtgtaatactgaatgctaagtaagagtggaaagcttccaccatccaccagaccattacaagcactacatacgccatcttcaatatcgtatattttcagtagtcaacttgactagctcttattggcggttttattcaagagaagattcatccggtgaaaattcaagcaactattactgcactagcaattggatcggtaaataggcgagatctgaaagtttcggtaaagttttagattacatggcttagtttcacacgctctttatattctcaaccttccgacgcaaatcaccagattcaataaatgagtcctactcctacacctactcttatcacttgtaatccaaaaaagctccatttctttcttatacgctaattcactattaaatagaaatgtatatgcaaaacagcgagaaatttgtagatacgttgaatgttgttgctttcacatttgcaactcttagtagttgttcaaaacaacaatgtcgagcaaagatgtttgcgatgtttgaatgattcttggattgtatttggattccatcggtactatggcctgttgattcggcacctttgtcattttagcaacttttgttttcttttctgtgtcgatgtagttctctataccatattcatgttcatattcatgttcatattcatgttcatatcaatgtccatatcaatgtccatatcaatttcccatgttccattacatatcccgtgttctttccttcttccagcttttacatgctagccttttatacaatgattcctctcatctcgactcgcttgatgaatgggcgtttagtttttgcaacaacatatgcgttgggttatctcatatcgggaaacactttctgccacttttaacttgaacaaagttggagaaataaagtgatggcagatattgcaagttgtttatagtgtgcctgtagaaatgtaaaaacgctatgtttcgtgaatgcccagcctgtaaatcgaaataagatttcgtatttattaagcattggaagatcacaattggaaaaaacacgatacggttggtctcttcacagtcgttctccagtaatcacaaacatgaaacctaaatatacggtaactttgcacctattaggacaacgcctcaagtgactgcattaaagcataataccgaagcactgacataacagagaggttcagaaaggaatttaaagattgactttttcgacaaacttcatgttacaagtcttatcgtttgtgtttataaatcatcagcctctctctatatctctatatctctatatctctatatatcagatataaagatgcaagttttgaagtagacattccgcacaaggtctagtacaccatgtctcttgtgctcaggctagttgtcctgcaaaaatgtacaacaggaaaatggatgtttcatcaaagatggactcctttgtctcatacttattgatggcgaagctagatccgttatcatcttgagaaaacacatcgttgtcttcagagtagtgatagttcttatcgttgtagttatagttgtagttatagttatagttgtagttgtaataactctttcaacaagtcctgaatcttggcaaacagaccctcatacagtgctgtcagctcactcaagtccaatcgcaccatgttaattaaacgcatctccaatgcacgggtacatagaattacttcgagactgaaacaatacggtgcttgggcttagtccttgtagtgtattttgcatacatacccttctgttcgaatgatatccctaatgactttgtgggtttcgtaaagaacatcatatagatttctttgaccaagtgtaataaagcaaaacacacggacatagtatggatatggacacagcatggatatggacacaagcaacactaccagtcgtttgaaacgatgaaatgggcaacaagtcgatttgtttttcatctatcaatcgttgtaattcacatgcagctacaagacgacacgttatatttagggtgcaaagcaggtagagatttcataggcatatttcgaagtaccagctttatgccaaaacatgcatgcatgcaagaaactccataacttcgtttgcgcaactcctgcttatcgtcttctttctatacccatgctgttggatcaatgaatgaacgtagcaatagatacaagatatagcgccacacttttgagcatatcctaatgacagtaattcgttttgttctaagcgaccaagtattcgcttgcaacactatagttctcactttgaggaaacattcctttgatgcccatgttcattccacttggatgacagaatcctcgatagtattagtattaatgaattaactgtcaggatgtgttgtcgttcttgaagtaagtcttgtgaaagaaaccaccgagttaaaaatagagatcttgatggttttatatataaaagtttaatgcttgcctatttatacatttcccaaggactgctgaggtagatgcgttgttcagttgactaggatttgtttgaattcaaagattatctattcaagtcttctttatacgtttgcatgtgtttgataagaattccattgattcagaaaaaaagtgccaacagtttttccaacttgactgacactacaaccttccaatcatagccatactactatggtataaaaataaaagtttacaattttactactgttatatatatttcgatggtagtgaagctttaaaaaaaagaaggaatagcataccgtcaagtcgttagttgatgggtagggttgttagcctaattatgagttttatttgtaaaataggtttaggttttagttttagttttaaattattagtccaatcatgagttgagctgctagtttaggcgtgcgttgaccttttagcttaggtgtattgtcacggtttggttttcatatctctgcgccgcctatattagcaaacagttgacatagaattcacaacaataacaaattaaaaatgcatcatcctgtaattaaaagaaggtatattgatgcatcctttgcgtgaatcagacacgtagaatcatgtttctctcatgacaaagagcacttatagtagcatatctagaatttttctctcagttttaactttcttcggtctcggtttttcccttgacaaagctgataatatatcatgtacaatcaggcaacacatttatttagtcaacgttcaagtccaaaagcaactttatgtcgtactaagatacagttttgcgaagcgacatagatctcataacgcctcaatgttttattagtaattcttcgtgatcacactacctgtgtaaaatggatgaagagaaacgagctttaagcagtaataacgtgtgcgctaaaaaatttgtgtattacgaaagactttatatgactaatttcgttactgaatgtatttaagcttgatagtcttgatgctatcgaccaattctttttaaacaatgttacttcattttgctagggtaaacataaagtgaatgagtagtagaagggtaagaatatgtaggatgaaaacagattccggaagctgcatatgtgagcagacacaggtattttgaactgccttcaagtctcttaataagtaaggaagtcgctattattggattagtagacccacatcaccaaaatttcttgccatgacgacatcacgtgtactagagcaattcgggtcatacttcgtgttcaattctggtttgatttcttttttttcgagtatgattgtcaacaaaaaacgataaagacttttacatctccagtcagctgaactccagtaattaaagttcgatattgtttaaaaattaaaaaaacaaacaaacaaaaagatgaaatgatgaaatgattgatgacgattttaaaaaagatcaaaacttgaaactcatatcacaagaaatggagacaacattcaactataaagtttttcagcgagacatgtaccgattgattcggtctttgcaggactcttgatgtttgcctaatcgggttaaattgtggtggtgtggtaatacgtactagctctcgtttctttatatccaactgacggcatcgcttgtacttttttaataacttctttttcctcttcgtatggtgtgtaaactgaatggaaacgatgaacccatcatgaacctcacatcatttggttccgtctatttagtgctcacccagtgttgctttatgaaatgaaacaatggttgatgttttcatcaatcacccatgaattagtttggggtaaatatgattctattattatctctttctcaaagtgctaagcgatgatgtacatgtatctatgttttccaaaatctttatctcaatttttgaaacaggacttttaatagtctttcatatcagcaattgtttcagaaaatgttaacaaccatcaatatttacacaaatgatataaacactgattttaccaagattaccagcgataaaatgagtaaattaagctctttagaagtctaatggtaattgataaatatcgtgtggaaagtataccgaagtttggaagaacaagaactttgaaggatgaattttccgaaatgtctttggtatttgtaattttactacatatattttattaacagcattttgaaattttttaaaaacttatttccttgcctttgtagctcagtcaccattacttcactaagctatttgagaattatatgtttattataaatactcatgaatctttcccaagcaaacttaccttgatctaataattctaaccattcgatccatttttatttatttaacttttcatttcatatctatcttgtttggtttgtgataaactcttttttgggaatacattgggtttaaactctgatttgtaaatttatttttatttttattcttatttattttgtcacatctttacttgagtgctcatgcgacatttggaaaaacggtgcaattgagcaaggctgaattacttatttttacatttattgaccacttttattgaagctaagctatataatgaatgcaacggttatgtgagattgagtaagaagtgttatggaataagcaaagttaaatcagtagctttaattttttgttgtttttaattttaatttgcaaacaaacaaacaaaaacgtattcatatcatacacctaatattcattctttttattaaaaaagaaaaaaataagcactagtaaacttgattggttctatttatttgaatgaaagtaaacttcgttattgaaacacgaataggaatatcagacaacatatacgagtgtcaagaataaagaagagtttttagatttaaagcagttttgaatgaaaaaactcccataaaatgattaaatcacattcattgcaataggaaactgtattcggtatatacaatcggtattgcatgttgtaccaagtataatatagtgatgagattttgaagtttgtgttctattaccacatggacctacgtcaggagtggagaccataatcattgtaagtatgttgaaaaactttatccaaagggtaaaaactcagtccttcgaattataaatcggaccagagttgccgcaattgaaacgaattagataagtgaacaggacatgcttagcaagtacaaaccagtataattagaattgaattaacaaaggtaaaacttgaacgttcatgtttgtatactcaaaagaatcaacggagttgtgaaattttcttagtggagtttactcattgattttttaccacttacacacataagtcttatacttgccaagttgaatggtaccattagtaccagtactagtgtcatctagtgtcagtactagtgtcagtataggcatcaacatcatcaccagtatcggcgccagcatcagcacagcaccactaccactaccacttccacttaccacttacacttaccacaagcactaccaccaccaccaccacttccacttaccacttccacttaccacttccacttaccacttccacttaccacttccacttaccacttccacttaccacttccacttaccacttccacttaccacttccacttaccacttccattactaccacgactaccactaaccatcaccactttcatctccattcttgtcattattggcttgttgtacgttgttcaaatgtttcaacgtatgtacatttgtgactacgatttcttgttagcgatataaacgaagaggataaagactttggagtaaataattttggccgtgccactagcataatgtatttgtgcgtctaggtatccttagcgttgcaagtggaaagtggcttcacactataaatggttgacacagctaatacattagacataaactttctcagcattcacgaacagtaaaaatactattggtaaatgattcatggatatatagtattagtatttggcattcgtttcgcttatgaattgtgattgaaccgatatcgtatcatcattaaaagtttcctgtacatcttctacatcattcaaacatgtggaagaatcataaatttcacaaaaataatgtctcaatcgcatacgtattgtctgctctgacttggcttgtcttctgtatgtgatccaaatagacgagaatgtcaatccatcatgtacgaccaatcacacttcctatagctgaaaccgagtgcaaatgcttttgtagcaatcatgatctgtgcctttccaagttaggggttccaagactcgtcaaagtgaatttttcattcttcttcatttaaatctctcgtgtaaatggttatcaagatgtgatgagagaacaagtcagggtggtcgaaaaggatgcttaattaatgtacggtgaacgtttcatgtttattcattgaatcacctttccaaagtctattattttgtttttatcaacattcgaaaattcaagggaaagcttaaatctcttctaagaatacatgcagaaacaagaaaaatggtttcccgcccagtggatgcttctgtgaatacacaaaagttttgtatgaaaggttaaagcggttgtttggcactgaatgtaactaccaaggaaaaagtaatgctaagcaaatttaatgatgcatatataattgggacaattgcaacatttgcaatgttttgccaaagcgaaattgtatctttcgtttgcgtataaggaatgtgcctcgtcaaattatcatccatcccagctgaacaaatactgtcaaagatttcaaaaaataccgtgaagcatttgctttattaacgatgttactcaataaaaagatattcatttgtggcataacaagttctcaattcgattccaagtacatggagagcgtatgttgaaattaataaatctaaaatggtgattaaggaaggattactgtgcatctttgaaagtcattcaattccttaattaaaaacgaccaatatgctgcggttcacccttaacatcatgtttttaaccaacgacatcatgggtagtaaaataagtaaaaccatattcatattctttcttaattttctcaattttgatcgtatttcgtttttttccacaacaccagatattaaaatcgataaagaactttttccatccgcagttgggagtacatcattcctacttcgatatacttttgaaagagaaaagtgaaccgattggaattgtttcgacaacacgaattttacttctaggtcatatatttatggcgatgccaaacaacaatattgttgagacagtaagttaagcaaatggctaaataaatccaagactgttgttgagtgctgtggatctcaatattatcagtatctactcttctcgatgatcctgtaaatttttgttatctttttttatttgcagttactgataatactagcattttgcatgcttttttttatttggatgttcttccaattgatcaatacagtaactttagaactatcatcgctatgcctttaaatgaccgcactaaaagcatggtaccgaagcactgacataacagagaggttcagaaaggaatttaaagattgactttttcgataaacttcatgttacaagtcttatcgtttgtgtttataaatcatcagcctctctctatatctctatatctctatatctctatatatcagatataaagatgcgagttttgaagtagacattccgcacaaagtctagtacaccatgtctcttgtgctcaggctggttgtcctgcaaaaatgtacaacaggcaaatggatgtttcatcaaagatggactcctttgcctcatacttattgatggcgaagctagatccgttatcatcttgagaaaacacatcgttgtcttcagagtagtgatagttcttatcgttgtagttatagttgtagttatagttatagttgtagttgtaataactctttcaacaagtcctgaatcttggcaaacagaccctcatacagtgctgtcagctcactcaagtccaatcgcaccatgttaattaaacgcatctccaatgcacgggtacatagaattacttcgagactgaaacaatacggtgcttgggcttagtccttgtagtgtattttgcatacatacccttctgttcgaatgatatccctaatgactttgtgggtttcgtaaagaacatcatatagatttctttgaccaagtgtaataaagcaaaacacacggacatagtatggatatggacacagcatggatatggacacaagcaacactaccagtcgtttgaaacgatgaaatgggcaacaagtcgatttgtttttcatctatcaatcgttgtaattcacatgcagctacaagacgacacgttatatttagggtgcaaagcaggtagagatttcataggcatatttcgaagtaccagctttatgccaaaacatgcatgcatgcaagaaactccataacttcgtttgcgcaactcctgcttatcgtcttctttctatacccatgctgttggatcaatgaatgaacgtagcaatagatacaagatatagcgccacacttttgagcatatcctaatgacagtaattcgttttgttctaagcgaccaagtattcgcttgcaacactatagttctcactttgaggaaacattcctttgatgcccatgttcattccacttggatgacagaatcctcgatagtattagtattaatgaattaactgtcaggatgtgttgtcgttcttgaagtaagtcttgtgaaagaaaccaccgagttaaaaatagagatcttgatggttttatatataaaagtttaatgcttgcctatttatacatttcccaaggactgctgaggtagatgcgttgttcagttgactaggatttgtttgaattcaaagattatctattcaagtcttctttatacgtttgcatgtgtttgataagaattccattgattcagaaaaaaagtgccaacagtttttccaacttgactgacactacaaccttccaatcatagccatactactatggtataaaaataaaagtttacaattttactactgttatatatatttcgatggtagtgaagctttaaaaaaaagaaggaatagcataccgtcaagtcgttagttgatgggtagggttgttagcctaattatgagttttatttgtaaaataggtttaggttttagttttagttttaaattattagtccaatcatgagttgagctgctagtttaggcgtgcgttgaccttttagcttaggtgtattgtcacggtttggttttcatatctctgcgccgcctatattagcaaacagttgacatagaattcacaacaataacaaattaaaaatgcatcatcctgtaattaaaagaaggtatattgatgcatcctttgcgtgaatcagacacgtagaatcatgtttctctcatgacaaagagcacttatagtagcatatctagaatttttctctcagttttaactttcttcggtctcggtttttcccttgacaaagctgataatatatcatgtacaatcaggcaacacatttatttagtcaacgttcaagtccaaaagcaactttatgtcgtactaagatacagttttgcgaagcgacatagatctcataacgcctcaatgttttattagtaattcttcgtgatcacactacctgtgtaaaatggatgaagagaaacgagctttaagcagtaataacgtgtgcgctaaaaaatttgtgtattacgaaagactttatatgactaatttcgttactgaatgtatttaagcttgatagtcttgatgctatcgaccaattctttttaaacaatgttacttcattttgctagggtaaacataaagtgaatgagtagtagaagggtaagaatatgtaggatgaaaacagattccggaagctgcatatgtgagcagacacaggtattttgaactgccttcaagtctcttaataagtaaggaagtcgctattattggattagtagacccacatcaccaaaatttcttgccatgacgacatcacgtgtactagagcaattcgggtcatacttcgtgttcaattctggtttgatttcttttttttcgagtatgattgtcaacaaaaaacgataaagacttttacatctccagtcagctgaactccagtaattaaagttcgatattgtttaaaaattaaaaaaacaaacaaacaaaaagatgaaatgatgaaatgattgatgacgattttaaaaaagatcaaaacttgaaactcatatcacaagaaatggagacaacattcaactataaagtttttcagcgagacatgtaccgattgattcggtctttgcaggactcttgatgtttgcctaatcgggttaaattgtggtggtgtggtaatacgtactagctctcgtttctttatatccaactgacggcatcgcttgtacttttttaataacttctttttcctcttcgtatggtgtgtaaactgaatggaaacgatgaacccatcatgaacctcacatcatttggttccgtctatttagtgctcacccagtgttgctttatgaaatgaaacaatggttgatgttttcatcaatcacccatgaattagtttggggtaaatatgattctattattatctctttctcaaagtgctaagcgatgatgtacatgtatctatgttttccaaaatctttatctcaatttttgaaacaggacttttaatagtctttcatatcagcaattgtttcagaaaatgttaacaaccatcaatatttacacaaatgatataaacactgattttaccaagattaccagcgataaaatgagtaaattaagctctttagaagtctaatggtaattgataaatatcgtgtggaaagtataccgaagtttggaagaacaagaactttgaaggatgaattttccgaaatgtctttggtatttgtaattttactacatatattttattaacagcattttgaaattttttaaaaacttatttccttgcctttgtagctcagtcaccattacttcactaagctatttgagaattatatgtttattataaatactcatgaatctttcccaagcaaacttaccttgatctaataattctaaccattcgatccatttttatttatttaacttttcatttcatatctatcttgtttggtttgtgataaactcttttttgggaatacattgggtttaaactctgatttgtaaatttatttttatttttattcttatttattttgtcacatctttacttgagtgctcatgcgacatttggaaaaacggtgcaattgagcaaggctgaattacttatttttacatttattgaccacttttattgaagctaagctatataatgaatgcaacggttatgtgagattgagtaagaagtgttatggaataagcaaagttaaatcagtagctttaattttttgttgtttttaattttaatttgcaaacaaacaaacaaaaacgtattcatatcatacacctaatattcattctttttattaaaaaagaaaaaaataagcactagtaaacttgattggttctatttatttgaatgaaagtaaacttcgttattgaaacacgaataggaatatcagacaacatatacgagtgtcaagaataaagaagagtttttagatttaaagcagttttgaatgaaaaaactcccataaaatgattaaatcacattcattgcaataggaaactgtattcggtatatacaatcggtattgcatgttgtaccaagtataatatagtgatgagattttgaagtttgtgttctattaccacatggacctacgtcaggagtggagaccataatcattgtaagtatgttgaaaaactttatccaaagggtaaaaactcagtccttcgaattataaatcggaccagagttgccgcaattgaaacgaattagataagtgaacaggacatgcttagcaagtacaaaccagtataattagaattgaattaacaaaggtaaaacttgaacgttcatgtttgtatactcaaaagaatcaacggagttgtgaaattttcttagtggagtttactcattgattttttaccacttacacacataagtcttatacttgccaagttgaatggtaccattagtaccagtactagtgtcatctagtgtcagtactagtgtcagtataggcatcaacatcatcaccagtatcggcgccagcatcagcacagcaccactaccactaccacttccacttaccacttacacttaccacaagcactaccaccaccaccaccacttccacttaccacttccacttaccacttccacttaccacttccacttaccacttccacttaccacttccacttaccacttccacttaccacttccacttaccacttccacttaccacttccattactaccacgactaccactaaccatcaccactttcatctccattcttgtcattattggcttgttgtacgttgttcaaatgtttcaacgtatgtacatttgtgactacgatttcttgttagcgatataaacgaagaggataaagactttggagtaaataattttggccgtgccactagcataatgtatttgtgcgtctaggtatccttagcgttgcaagtggaaagtggcttcacactataaatggttgacacagctaatacattagacataaactttctcagcattcacgaacagtaaaaatactattggtaaatgattcatggatatatagtattagtatttggcattcgtttcgcttatgaattgtgattgaaccgatatcgtatcatcattaaaagtttcctgtacatcttctacatcattcaaacatgtggaagaatcataaatttcacaaaaataatgtctcaatcgcatacgtattgtctgctctgacttggcttgtcttctgtatgtgatccaaatagacgagaatgtcaatccatcatgtacgaccaatcacacttcctatagctgaaaccgagtgcaaatgcttttgtagcaatcatgatctgtgcctttccaagttaggggttccaagactcgtcaaagtgaatttttcattcttcttcatttaaatctctcgtgtaaatggttatcaagatgtgatgagagaacaagtcagggtggtcgaaaaggatgcttaattaatgtacggtgaacgtttcatgtttattcattgaatcacctttccaaagtctattattttgtttttatcaacattcgaaaattcaagggaaagcttaaatctcttctaagaatacatgcagaaacaagaaaaatggtttcccgcccagtggatgcttctgtgaatacacaaaagttttgtatgaaaggttaaagcggttgtttggcactgaatgtaactaccaaggaaaaagtaatgctaagcaaatttaatgatgcatatataattgggacaattgcaacatttgcaatgttttgccaaagcgaaattgtatctttcgtttgcgtataaggaatgtgcctcgtcaaattatcatccatcccagctgaacaaatactgtcaaagatttcaaaaaataccgtgaagcatttgctttattaacgatgttactcaataaaaagatattcatttgtggcataacaagttctcaattcgattccaagtacatggagagcgtatgttgaaattaataaatctaaaatggtgattaaggaaggattactgtgcatctttgaaagtcattcaattccttaattaaaaacgaccaatatgctgcggttcacccttaacatcatgtttttaaccaacgacatcatgggtagtaaaataagtaaaaccatattcatattctttcttaattttctcaattttgatcgtatttcgtttttttccacaacaccagatattaaaatcgataaagaactttttccatccgcagttgggagtacatcattcctacttcgatatacttttgaaagagaaaagtgaaccgattggaattgtttcgacaacacgaattttacttctaggtcatatatttatggcgatgccaaacaacaatattgttgagacagtaagttaagcaaatggctaaataaatccaagactgttgttgagtgctgtggatctcaatattatcagtatctactcttctcgatgatcctgtaaatttttgttatctttttttatttgcagttactgataatactagcattttgcatgcttttttttatttggatgttcttccaattgatcaatacagtaactttagaactatcatcgctatgcctttaaatgaccgcactaaaagcatggtaccgaagcactgacataacagagaggttcagaaaggaatttaaagattgactttttcgataaacttcatgttacaagtcttatcgtttgtgtttataaatcatcagcctctctctatatctctatatctctatatctctatatatcagatataaagatgcgagttttgaagtagacattccgcacaaagtctagtacaccatgtctcttgtgctcaggctggttgtcctgcaaaaatgtacaacaggcaaatggatgtttcatcaaagatggactcctttgcctcatacttattgatggcgaagctagatccgttatcatcttgagaaaacacatcgttgtcttcagagtagtgatagttcttatcgttgtagttatagttgtagttatagttatagttgtagttgtaataactctttcaacaagtcctgaatcttggcaaacagaccctcatacagtgctgtcagctcactcaagtccaatcgcaccatgttaattaaacgcatctccaatgcacgggtacatagaattacttcgagactgaaacaatacggtgcttgggcttagtccttgtagtgtattttgcatacatacccttctgttcgaatgatatccctaatgactttgtgggtttcgtaaagaacatcatatagatttctttgaccaagtgtaataaagcaaaacacacggacatagtatggatatggacacagcatggatatggacacaagcaacactaccagtcgtttgaaacgatgaaatgggcaacaagtcgatttgtttttcatctatcaatcgttgtaattcacatgcagctacaagacgacacgttatatttagggtgcaaagcaggtagagatttcataggcatatttcgaagtaccagctttatgccaaaacatgcatgcatgcaagaaactccataacttcgtttgcgcaactcctgcttatcgtcttctttctatacccatgctgttggatcaatgaatgaacgtagcaatagatacaagatatagcgccacacttttgagcatatcctaatgacagtaattcgttttgttctaagcgaccaagtattcgcttgcaacactatagttctcactttgaggaaacattcctttgatgcccatgttcattccacttggatgacagaatcctcgatagtattagtattaatgaattaactgtcaggatgtgttgtcgttcttgaagtaagtcttgtgaaagaaaccaccgagttaaaaatagagatcttgatggttttatatataaaagtttaatgcttgcctatttatacatttcccaaggactgctgaggtagatgcgttgttcagttgactaggatttgtttgaattcaaagattatctattcaagtcttctttatacgtttgcatgtgtttgataagaattccattgattcagaaaaaaagtgccaacagtttttccaacttgactgacactacaaccttccaatcatagccatactactatggtataaaaataaaagtttacaattttactactgttatatatatttcgatggtagtgaagctttaaaaaaaagaaggaatagcataccgtcaagtcgttagttgatgggtagggttgttagcctaattatgagttttatttgtaaaataggtttaggttttagttttagttttaaattattagtccaatcatgagttgagctgctagtttaggcgtgcgttgaccttttagcttaggtgtattgtcacggtttggttttcatatctctgcgccgcctatattagcaaacagttgacatagaattcacaacaataacaaattaaaaatgcatcatcctgtaattaaaagaaggtatattgatgcatcctttgcgtgaatcagacacgtagaatcatgtttctctcatgacaaagagcacttatagtagcatatctagaatttttctctcagttttaactttcttcggtctcggtttttcccttgacaaagctgataatatatcatgtacaatcaggcaacacatttatttagtcaacgttcaagtccaaaagcaactttatgtcgtactaagatacagttttgcgaagcgacatagatctcataacgcctcaatgttttattagtaattcttcgtgatcacactacctgtgtaaaatggatgaagagaaacgagctttaagcagtaataacgtgtgcgctaaaaaatttgtgtattacgaaagactttatatgactaatttcgttactgaatgtatttaagcttgatagtcttgatgctatcgaccaattctttttaaacaatgttacttcattttgctagggtaaacataaagtgaatgagtagtagaagggtaagaatatgtaggatgaaaacagattccggaagctgcatatgtgagcagacacaggtattttgaactgccttcaagtctcttaataagtaaggaagtcgctattattggattagtagacccacatcaccaaaatttcttgccatgacgacatcacgtgtactagagcaattcgggtcatacttcgtgttcaattctggtttgatttcttttttttcgagtatgattgtcaacaaaaaacgataaagacttttacatctccagtcagctgaactccagtaattaaagttcgatattgtttaaaaattaaaaaaacaaacaaacaaaaagatgaaatgatgaaatgattgatgacgattttaaaaaagatcaaaacttgaaactcatatcacaagaaatggagacaacattcaactataaagtttttcagcgagacatgtaccgattgattcggtctttgcaggactcttgatgtttgcctaatcgggttaaattgtggtggtgtggtaatacgtactagctctcgtttctttatatccaactgacggcatcgcttgtacttttttaataacttctttttcctcttcgtatggtgtgtaaactgaatggaaacgatgaacccatcatgaacctcacatcatttggttccgtctatttagtgctcacccagtgttgctttatgaaatgaaacaatggttgatgttttcatcaatcacccatgaattagtttggggtaaatatgattctattattatctctttctcaaagtgctaagcgatgatgtacatgtatctatgttttccaaaatctttatctcaatttttgaaacaggacttttaatagtctttcatatcagcaattgtttcagaaaatgttaacaaccatcaatatttacacaaatgatataaacactgattttaccaagattaccagcgataaaatgagtaaattaagctctttagaagtctaatggtaattgataaatatcgtgtggaaagtataccgaagtttggaagaacaagaactttgaaggatgaattttccgaaatgtctttggtatttgtaattttactacatatattttattaacagcattttgaaattttttaaaaacttatttccttgcctttgtagctcagtcaccattacttcactaagctatttgagaattatatgtttattataaatactcatgaatctttcccaagcaaacttaccttgatctaataattctaaccattcgatccatttttatttatttaacttttcatttcatatctatcttgtttggtttgtgataaactcttttttgggaatacattgggtttaaactctgatttgtaaatttatttttatttttattcttatttattttgtcacatctttacttgagtgctcatgcgacatttggaaaaacggtgcaattgagcaaggctgaattacttatttttacatttattgaccacttttattgaagctaagctatataatgaatgcaacggttatgtgagattgagtaagaagtgttatggaataagcaaagttaaatcagtagctttaattttttgttgtttttaattttaatttgcaaacaaacaaacaaaaacgtattcatatcatacacctaatattcattctttttattaaaaaagaaaaaaataagcactagtaaacttgattggttctatttatttgaatgaaagtaaacttcgttattgaaacacgaataggaatatcagacaacatatacgagtgtcaagaataaagaagagtttttagatttaaagcagttttgaatgaaaaaactcccataaaatgattaaatcacattcattgcaataggaaactgtattcggtatatacaatcggtattgcatgttgtaccaagtataatatagtgatgagattttgaagtttgtgttctattaccacatggacctacgtcaggagtggagaccataatcattgtaagtatgttgaaaaactttatccaaagggtaaaaactcagtccttcgaattataaatcggaccagagttgccgcaattgaaacgaattagataagtgaacaggacatgcttagcaagtacaaaccagtataattagaattgaattaacaaaggtaaaacttgaacgttcatgtttgtatactcaaaagaatcaacggagttgtgaaattttcttagtggagtttactcattgattttttaccacttacacacataagtcttatacttgccaagttgaatggtaccattagtaccagtactagtgtcatctagtgtcagtactagtgtcagtataggcatcaacatcatcaccagtatcggcgccagcatcagcacagcaccactaccactaccacttccacttaccacttacacttaccacaagcactaccaccaccaccaccacttccacttaccacttccacttaccacttccacttaccacttccacttaccacttccacttaccacttccacttaccacttccacttaccacttccacttaccacttccacttaccacttccattactaccacgactaccactaaccatcaccactttcatctccattcttgtcattattggcttgttgtacgttgttcaaatgtttcaacgtatgtacatttgtgactacgatttcttgttagcgatataaacgaagaggataaagactttggagtaaataattttggccgtgccactagcataatgtatttgtgcgtctaggtatccttagcgttgcaagtggaaagtggcttcacactataaatggttgacacagctaatacattagacataaactttctcagcattcacgaacagtaaaaatactattggtaaatgattcatggatatatagtattagtatttggcattcgtttcgcttatgaattgtgattgaaccgatatcgtatcatcattaaaagtttcctgtacatcttctacatcattcaaacatgtggaagaatcataaatttcacaaaaataatgtctcaatcgcatacgtattgtctgctctgacttggcttgtcttctgtatgtgatccaaatagacgagaatgtcaatccatcatgtacgaccaatcacacttcctatagctgaaaccgagtgcaaatgcttttgtagcaatcatgatctgtgcctttccaagttaggggttccaagactcgtcaaagtgaatttttcattcttcttcatttaaatctctcgtgtaaatggttatcaagatgtgatgagagaacaagtcagggtggtcgaaaaggatgcttaattaatgtacggtgaacgtttcatgtttattcattgaatcacctttccaaagtctattattttgtttttatcaacattcgaaaattcaagggaaagcttaaatctcttctaagaatacatgcagaaacaagaaaaatggtttcccgcccagtggatgcttctgtgaatacacaaaagttttgtatgaaaggttaaagcggttgtttggcactgaatgtaactaccaaggaaaaagtaatgctaagcaaatttaatgatgcatatataattgggacaattgcaacatttgcaatgttttgccaaagcgaaattgtatctttcgtttgcgtataaggaatgtgcctcgtcaaattatcatccatcccagctgaacaaatactgtcaaagatttcaaaaaataccgtgaagcatttgctttattaacgatgttactcaataaaaagatattcatttgtggcataacaagttctcaattcgattccaagtacatggagagcgtatgttgaaattaataaatctaaaatggtgattaaggaaggattactgtgcatctttgaaagtcattcaattccttaattaaaaacgaccaatatgctgcggttcacccttaacatcatgtttttaaccaacgacatcatgggtagtaaaataagtaaaaccatattcatattctttcttaattttctcaattttgatcgtatttcgtttttttccacaacaccagatattaaaatcgataaagaactttttccatccgcagttgggagtacatcattcctacttcgatatacttttgaaagagaaaagtgaaccgattggaattgtttcgacaacacgaattttacttctaggtcatatatttatggcgatgccaaacaacaatattgttgagacagtaagttaagcaaatggctaaataaatccaagactgttgttgagtgctgtggatctcaatattatcagtatctactcttctcgatgatcctgtaaatttttgttatctttttttatttgcagttactgataatactagcattttgcatgcttttttttatttggatgttcttccaattgatcaatacagtaactttagaactatcatcgctatgcctttaaatgaccgcactaaaagcatggtaccgaagcactgacataacagagaggttcagaaaggaatttaaagattgactttttcgataaacttcatgttacaagtcttatcgtttgtgtttataaatcatcagcctctctctatatctctatatctctatatctctatatatcagatataaagatgcgagttttgaagtagacattccgcacaaagtctagtacaccatgtctcttgtgctcaggctggttgtcctgcaaaaatgtacaacaggcaaatggatgtttcatcaaagatggactcctttgcctcatacttattgatggcgaagctagatccgttatcatcttgagaaaacacatcgttgtcttcagagtagtgatagttcttatcgttgtagttatagttgtagttatagttatagttgtagttgtaataactctttcaacaagtcctgaatcttggcaaacagaccctcatacagtgctgtcagctcactcaagtccaatcgcaccatgttaattaaacgcatctccaatgcacgggtacatagaattacttcgagactgaaacaatacggtgcttgggcttagtccttgtagtgtattttgcatacatacccttctgttcgaatgatatccctaatgactttgtgggtttcgtaaagaacatcatatagatttctttgaccaagtgtaataaagcaaaacacacggacatagtatggatatggacacagcatggatatggacacaagcaacactaccagtcgtttgaaacgatgaaatgggcaacaagtcgatttgtttttcatctatcaatcgttgtaattcacatgcagctacaagacgacacgttatatttagggtgcaaagcaggtagagatttcataggcatatttcgaagtaccagctttatgccaaaacatgcatgcatgcaagaaactccataacttcgtttgcgcaactcctgcttatcgtcttctttctatacccatgctgttggatcaatgaatgaacgtagcaatagatacaagatatagcgccacacttttgagcatatcctaatgacagtaattcgttttgttctaagcgaccaagtattcgcttgcaacactatagttctcactttgaggaaacattcctttgatgcccatgttcattccacttggatgacagaatcctcgatagtattagtattaatgaattaactgtcaggatgtgttgtcgttcttgaagtaagtcttgtgaaagaaaccaccgagttaaaaatagagatcttgatggttttatatataaaagtttaatgcttgcctatttatacatttcccaaggactgctgaggtagatgcgttgttcagttgactaggatttgtttgaattcaaagattatctattcaagtcttctttatacgtttgcatgtgtttgataagaattccattgattcagaaaaaaagtgccaacagtttttccaacttgactgacactacaaccttccaatcatagccatactactatggtataaaaataaaagtttacaattttactactgttatatatatttcgatggtagtgaagctttaaaaaaaagaaggaatagcataccgtcaagtcgttagttgatgggtagggttgttagcctaattatgagttttatttgtaaaataggtttaggttttagttttagttttaaattattagtccaatcatgagttgagctgctagtttaggcgtgcgttgaccttttagcttaggtgtattgtcacggtttggttttcatatctctgcgccgcctatattagcaaacagttgacatagaattcacaacaataacaaattaaaaatgcatcatcctgtaattaaaagaaggtatattgatgcatcctttgcgtgaatcagacacgtagaatcatgtttctctcatgacaaagagcacttatagtagcatatctagaatttttctctcagttttaactttcttcggtctcggtttttcccttgacaaagctgataatatatcatgtacaatcaggcaacacatttatttagtcaacgttcaagtccaaaagcaactttatgtcgtactaagatacagttttgcgaagcgacatagatctcataacgcctcaatgttttattagtaattcttcgtgatcacactacctgtgtaaaatggatgaagagaaacgagctttaagcagtaataacgtgtgcgctaaaaaatttgtgtattacgaaagactttatatgactaatttcgttactgaatgtatttaagcttgatagtcttgatgctatcgaccaattctttttaaacaatgttacttcattttgctagggtaaacataaagtgaatgagtagtagaagggtaagaatatgtaggatgaaaacagattccggaagctgcatatgtgagcagacacaggtattttgaactgccttcaagtctcttaataagtaaggaagtcgctattattggattagtagacccacatcaccaaaatttcttgccatgacgacatcacgtgtactagagcaattcgggtcatacttcgtgttcaattctggtttgatttcttttttttcgagtatgattgtcaacaaaaaacgataaagacttttacatctccagtcagctgaactccagtaattaaagttcgatattgtttaaaaattaaaaaaacaaacaaacaaaaagatgaaatgatgaaatgattgatgacgattttaaaaaagatcaaaacttgaaactcatatcacaagaaatggagacaacattcaactataaagtttttcagcgagacatgtaccgattgattcggtctttgcaggactcttgatgtttgcctaatcgggttaaattgtggtggtgtggtaatacgtactagctctcgtttctttatatccaactgacggcatcgcttgtacttttttaataacttctttttcctcttcgtatggtgtgtaaactgaatggaaacgatgaacccatcatgaacctcacatcatttggttccgtctatttagtgctcacccagtgttgctttatgaaatgaaacaatggttgatgttttcatcaatcacccatgaattagtttggggtaaatatgattctattattatctctttctcaaagtgctaagcgatgatgtacatgtatctatgttttccaaaatctttatctcaatttttgaaacaggacttttaatagtctttcatatcagcaattgtttcagaaaatgttaacaaccatcaatatttacacaaatgatataaacactgattttaccaagattaccagcgataaaatgagtaaattaagctctttagaagtctaatggtaattgataaatatcgtgtggaaagtataccgaagtttggaagaacaagaactttgaaggatgaattttccgaaatgtctttggtatttgtaattttactacatatattttattaacagcattttgaaattttttaaaaacttatttccttgcctttgtagctcagtcaccattacttcactaagctatttgagaattatatgtttattataaatactcatgaatctttcccaagcaaacttaccttgatctaataattctaaccattcgatccatttttatttatttaacttttcatttcatatctatcttgtttggtttgtgataaactcttttttgggaatacattgggtttaaactctgatttgtaaatttatttttatttttattcttatttattttgtcacatctttacttgagtgttcatgcgacatttggaaaaacggtgcaattgagcaaggctgaattacttatttttacatttattgaccacttttattgaagctaagctatataatgaatgcaacggttatgtgagattgagtaagaagtgttatggaataagcaaagttaaatcagtagctttaattttttgttgtttttaattttaatttgcaaacaaacaaacaaaaacgtattcatatcatacacctaatattcattctttttattaaaaaagaaaaaaataagcactagtaaacttgattggttctatttatttgaatgaaagtaaacttcgttattgaaacacgaataggaatatcagacaacatatacgagtgtcaagaataaagaagagtttttagatttaaagcagttttgaatgaaaaaactcccataaaatgattaaatcacattcattgcaataggaaactgtattcggtatatacaatcggtattgcatgttgtaccaagtataatatagtgatgagattttgaagtttgtgttctattaccacatggacctacgtcaggagtggagaccataatcattgtaagtatgttgaaaaactttatccaaagggtaaaaactcagtccttcgaattataaatcggaccagagttgccgcaattgaaacgaattagataagtgaacaggacatgcttagcaagtacaaaccagtataattagaattgaattaacaaaggtaaaacttgaacgttcatgtttgtatactcaaaagaatcaacggagttgtgaaattttcttagtggagtttactcattgattttttaccacttacacacataagtcttatacttgccaagttgaatggtaccattagtaccagtactagtgtcatctagtgtcagtactagtgtcagtataggcatcaacatcatcaccagtatcggcgccagcatcagcacagcaccactaccactaccacttccacttaccacttacacttaccacaagcactaccaccaccaccaccacttccacttaccacttccacttaccacttccacttaccacttccacttaccacttccacttaccacttccacttaccacttccacttaccacttccacttaccacttccacttaccacttccattactaccacgactaccactaaccatcaccactttcatctccattcttgtcattattggcttgttgtacgttgttcaaatgtttcaacgtatgtacatttgtgactacgatttcttgttagcgatataaacgaagaggataaagactttggagtaaataattttggccgtgccactagcataatgtatttgtgcgtctaggtatccttagcgttgcaagtggaaagtggcttcacactataaatggttgacacagctaatacattagacataaactttctcagcattcacgaacagtaaaaatactattggtaaatgattcatggatatatagtattagtatttggcattcgtttcgcttatgaattgtgattgaaccgatatcgtatcatcattaaaagtttcctgtacatcttctacatcattcaaacatgtggaagaatcataaatttcacaaaaataatgtctcaatcgcatacgtattgtctgctctgacttggcttgtcttctgtatgtgatccaaatagacgagaatgtcaatccatcatgtacgaccaatcacacttcctatagctgaaaccgagtgcaaatgcttttgtagcaatcatgatctgtgcctttccaagttaggggttccaagactcgtcaaagtgaatttttcattcttcttcatttaaatctctcgtgtaaatggttatcaagatgtgatgagagaacaagtcagggtggtcgaaaaggatgcttaattaatgtacggtgaacgtttcatgtttattcattgaatcacctttccaaagtctattattttgtttttatcaacattcgaaaattcaagggaaagcttaaatctcttctaagaatacatgcagaaacaagaaaaatggtttcccgcccagtggatgcttctgtgaatacacaaaagttttgtatgaaaggttaaagcggttgtttggcactgaatgtaactaccaaggaaaaagtaatgctaagcaaatttaatgatgcatatataattgggacaattgcaacatttgcaatgttttgccaaagcgaaattgtatctttcgtttgcgtataaggaatgtgcctcgtcaaattatcatccatcccagctgaacaaatactgtcaaagatttcaaaaaataccgtgaagcatttgctttattaacgatgttactcaataaaaagatattcatttgtggcataacaagttctcaattcgattccaagtacatggagagcgtatgttgaaattaataaatctaaaatggtgattaaggaaggattactgtgcatctttgaaagtcattcaattccttaattaaaaacgaccaatatgctgcggttcacccttaacatcatgtttttaaccaacgacatcatgggtagtaaaataagtaaaaccatattcatattctttcttaattttctcaattttgatcgtatttcgtttttttccacaacaccagatattaaaatcgataaagaactttttccatccgcagttgggagtacatcattcctacttcgatatacttttgaaagagaaaagtgaaccgattggaattgtttcgacaacacgaattttacttctaggtcatatatttatggcgatgccaaacaacaatattgttgagacagtaagttaagcaaatggctaaataaatccaagactgttgttgagtgctgtggatctcaatattatcagtatctactcttctcgatgatcctgtaaatttttgttatctttttttatttgcagttactgataatactagcattttgcatgcttttttttatttggatgttcttccaattgatcaatacagtaactttagaactatcatcgctatgcctttaaatgaccgcactaaaagcatggtaccgaagcactgacataacagagaggttcagaaaggaatttaaagattgactttttcgataaacttcatgttacaagtcttatcgtttgtgtttataaatcatcagcctctctctatatctctatatctctatatctctatatatcagatataaagatgcgagttttgaagtagacattccgcacaaagtctagtacaccatgtctcttgtgctcaggctggttgtcctgcaaaaatgtacaacaggcaaatggatgtttcatcaaagatggactcctttgcctcatacttattgatggcgaagctagatccgttatcatcttgagaaaacacatcatcgtcgtactacattttttttcttactcattgcttgtttatctactacgattaaactattacaaaggatatccaggaagatgatacacaatgaaaaccgatatgtgggttgcaaaagataagcagtcaccgcaagatagagtaggatgggtttagatgttttcagtaccctaatgcggagtaaggctaatcacggtatttgtaattccatattataagaataaaaagtatcgcaacgatttgaactgtcaatatccatccattctgtccaaaatagtatccttgtatttgagaggatgatttagttatgcttctcaaaaactaaagcaattatagattggtgtttatgatttccaaatatgcgttagaaaatgatttttgtcaatgttattttaaaacaaaagagcatggtggtggttatggagtttaacaaacaagaaaaatgaacataatgtcacatttcgtcctcctttaaaagtgtaaaaaatcgaatactattctcaacttaagtagtcattaaatatagatgatatcgaggctttcggtttagtcgccaaattttactttgcgcagtctctcgtctatgttgctttttttttggtgtttttactttttaaatttcaaatttatgaaatttaggcgtgaatattgatgaccatataaagcataaaagttcaaatagactaaaaataatttgtgcgatttttcgatggttgatgttcgacctagggatttaccgcagaactttagctcttccaatcaaccgttattacctcgaaaggtataacaactcaacaagaccttatattgtctccaattctatatgttacgttatgctgttataaacagaagaaacggtgtatctgctgttgaataagtttttgcattcttatcacttggatgtattattacatttcgttggtttgtatatgtacatatacttaaacatgtgtgtttataaatcaagtaccatatttaaaaagtgtttattttttttatttttatttactcaattgttatgccacatactttaactaaagatatagtaagtatgagcaactggcgtacgtagacagagaaatagagtagcaaaaaattagtcataaactgatcaagtttattattaccattataactaagattatattcttccactgatttatgatttgttattgactagtcataaagtaagtgcacgagggttttgagatgcaacgttattcgctgtaaattatattttcagataaagtgtattaagcagcatgcaaaccatcagaaaagcaatttaattaggttggagtatatttgaaacagtaatgtctagcatagtgaattcttactgatgatacggagcagcatacgtatcgtatgaagcgaggagttagcaatgcttaaaaattcggtataacgagctatctcattacgattgttgtaacgtcaattattttgccaattcttttatcgaaagaaatcaaagtggaaaatgaataatcatgatagcatgttgagtggacatatgcgaattgtagtttaacattaatacagtcagaaaattaaaatataaaaaatggtgctgtgtttggactgtttgaagttaaattattggtgactcctgaagccaagctaggttagtaacgaaaagaaattgctgacttccataattttttctttattaaaaatattatcagcttagataacgtttttacgattacggtaccatcattttaattgcattcttcggactttttactttgtttttataactacgctggggatgaaatgcttttcccaagaaaacgttccgatgaatgaaaacataaatatcaattgcggtcgagaatatacccgatgcttatatcatacaaaatgaacattaaatttgagctttcaaaaaaagtatttcaaatcaaccaacaatatatttcgactttcgtacttttaaatccataattgttaacttcattaaggataaatctaagttaatataattttcgattgccacgtttagtctttacggatcgtgttcaacacccttcgggtgttttcattagaataaaaattgttaaaaagcgttaggttttagaactattcaatcagaataaaaaataatttaaatcccaatactaggattactaaactcccaaggcgagactcgaactcgcaaccttctgatgaccatcataagagtcagacgctctaaaccgattgagccactcgggacgggttttagctgagagtatacatagaacaatttatatttattacctttttttaggacacatattacgtcatagaaagaagtcaacaatgatcataaaagttactataatttttaacaagcaatggctttaaaataaaataatcaggtagttgacgatggaatatgtcctttacaaagaaatagtgatgtctcatgattatatggttgttgtctttctcatgcatatccaacaaaattaagtaaattgtactgcaattcaactgactatgttcaaacatatttttccttcgtacttgtataataacataaactcagttgaacgaaccaacgtatcgagaaagtccttaaaaggatagtttttaggtaatgaatccagggcttctggcaaacatgacaattcaatgtacaattcttcacagaacacaactttagagtttttgaaaaactgtgtgaggcaacctttcaagttctcgaaaaggtctttactctaagcaattctaaatgggtaagagcgttccaaagattgctgtcgtttgattctgacttcaaacgcagatgggaagaatgacaaaaaatgtaatcagtaattaattggttttcatattcatgaagacaagtaaagcataaacagtaaaagcgttgtttagattggacggcccgtctatagaatcataaccgtactaacataatgtgtaaataaaatttctatgctaacttcaatgtacaggtaaatgtacattaaaaatcaacaagtcttgtccgtcttaatatataaccaattttttcgagcgcgagcaaactgtagcttaaataaaccaatgtttatgaattcaaagtgaacgcataaatcatccacctctgtaaccaacataatttaatcacgatcctattatatttaattatgtttctataggccaggttcatcagtgtaactgtgcaacggaactgagaataaataatccaaattcgactactcattaagtatgcagcaacatacttagtatgacgacgaaaatccaataatagtactgttttcattatcattaagtagttttcaaagtaaaccgttttcgttaaacaattatctttatccatagtaacaaaaacacaccaaatattactttatccgttagtgaacgtaaataatgaaacctgaacaacactcaaaaatgtttctatgctactttaacaattcgcacaaaggaatagcacagggcgctttattatttcaataacattatcccgcagccgtaatcgtcaaagatgcatagaccattaactaagactcactgaaatatataaaaaaaaggcaacaactttcattatcgctttaaaaaacgtagagtgagttagatgcaaattccaaatttcctaaactttatagactgttaaaattaaaattagagcgtgcactttgttgactattatccgattcattagaaaactaagaaagaatatgaatgtggtaaaattgtttcagtaccacttttcattgagataattttatgagatttctataatgtcatctgaaaggctagttaaatcaataaatacgaataaacatttcagctgcaagcataaaaaaattaaaaaaaggcaaaccatgcaaattattttttggagctttaatattcatcacatttaaataaacaaggggtcttgctttaattggtccgggaaaaaataagcgaccttatcaactatatgttttttttgtttatttgtttattgaagatttaacaatatgcttcaagataaccgtggcgaacatagcaaacgactgagacgattgaactttgagtgttttaattttgccgtgactttagtaagcaatcgcgcatttgcaattcattattaaaaagcattttgggaattaaaaaagtgattgtgatcacactgtgaattcctgttctttacagaaaaagattgaaaaaagtcattgatgaatcatgatgcaaaacttataaactaatttatggaaaaactaatcgcttctatttcttaccttgaacattcacgatctttaaaatttgttgaataataaagtggtaaagataatcaggtggtttaagaggaagttataagtatttttttttaacagcttgtgaatgatgtaattgttatcgacttcccaagattctgctacaaacgttaggcttttttgggatttaataagaaacttagatgctcggtcacctacttgagcaattgcacgttcaaaatcgtcaaggtgaatacagttttcctaaatttcgttcttaatgcagcatccttaataaacaaaatacgcttgatccagaaaaccattctatccaacgtaatttagagcgatatcccttgatgcggaataatttcctttttagcttaagaaccacgattaatgaatggtgcaattcatccagaatggaatcttatgattaaccgtcttaacatgtctcaataggaagcagaggaactggattataagtcataggtcagttttatcgtaaaaacgtttgcagctttgttctatagttttttccagttttgtataaagaattctttacataaacttgtgttgttttacaaaaagtgtcacaaaccgggatcgaaccgatgaccaacagatcttcagtctgtcatgctcccaactacaccattgcgacttcatatacattaaaaactactaaaatatttataaagaaaattatttaccaatgtctgtaaaagccataatagcctttttaaatatttgttttatcctcgacattttcgagctgccaacctttgcattctgattctctaacagttttaaaagtaattgaaatctcataggtttttcattgaactatataacaatcgccgttgtttgtgtacgtgagcttgcaattaaacatgagcattttagtcatggggtttgaagcgactcataagaagtatgggatctcaaaaagaactgaaggctttagaaacaatcatatacgcttactacttacaggtactcactatttattttttgttcattcaagataactgttgcgcattttaaattcaagtctttgctttctatatactcctgacattgatttttataaactaatcatcatttttaatatattctttaacacacttcagacctgagtaatctacaacagtaataagtatctaaaaaaaaagctgcaatttttaaaaaattacaacagatccaatagtacacgattcaattcatagctcgtattagcaatttataaagcctttcatttttttcgtaaacccctctacaaatgctataaagcaacttcgtaaaataacaagacgaaaatgatagagaaataaaaaagtaccactggtgtttgcataataaaccctaacaatataaatgagtaaaatgtttaaaagaaaaaccgatagttcatataagttaaagcagataagaaacataactagtactttttataagttcataatcgactaatcgtcaataaacataatttaaggtgcctttgcgaactcttgaattcgttccttgtgcaacgaaattgccctcgaaacaatgtattgctcgatttctaccttttttacaatgtcatcgtcgctcaaatgaagccattcaaccgtttttgaggttacaaacgcgacagatcgtttccttgttgaaagaaggttggcgatcaccagctggtggttataacgttgtaaagctactcttgctttatcaatcagaatactagggtcggtttctaatttaaaggaaataatagaagcttcaggagcccatgtgtcaaccaagaaacgcagaaattttggaaccggatgcattttgacttctaatttgttacttccagaaccactttgaattttgtgctcgctcaattccttcggtggaatatggaaatcactaacagcagctgctaaataaaacaatgctcttgaagcgattatctgtaaacgttcagctatagctttcaggtaccacaaatattctgtgagtgtagtataaggaatcattatcagtcgatgatgtttcgtatatgtatctaattcgttgagtgcattgaatactgtcgattgaaactcttgtttgacaatccaaggcttctcctgactgccattacttctttcaaacaaatttgtccagggaccttcatatcgtcgagtaaatggcattaaactataatttctatacagaaaaatgaccgaatatccagacttgcaaaagtattcagcagatgctgcaccacgatttcctgcactaaagttatcgataaaacgcaccgtattttgctcaagaggcacaagtgtgccgccactagtaacaaatgcaatgttttgggagtttgattgaaggtttataaaatcttcaatcagacttgagacatcaccgagtgagttaggacaaggattctcctcaaagaaatcgttagatttatccatttctggcatatattctaaatagctaagagtatcgcaacccagaaatgcctctcttacgatgagctcaaaaataaacaaacgacgtttaaaaaactgtatgcgttattgctgaatgataggactagagaactcacaaaatctgaaatgctaaccaaacagttctctagcagcttgtaaattcagcaagtagtggtctgtttattgaacaatgtagacgatagcgacaccacaaacgactgaaacgcgacactttgtgattgtattacacttaaggccttttttttttattcaactcgtgcttgtcttttatgaaaagctaaaattaaaataaattttaagtttgtgttttaatcaacttaagactaaaaattttcatttatttgcgctctgttgggtaacgtggtttagttaccaacattttactgattatctaaaatgaataaatctccaattgaagaggaatttgatcttcggaaacagcaccaaaagctattaaaaaaaaattgccagaaagaaattgaagattttgtgaaatgcgctactggcaggacttttagcgtaacctggaaatgtagaagtgaaaataaaacgatgaaggattgtttaaccaaagcgtaagaaacttattcatcaatcatgtataaaaaaggatatgtaactaatatggaatatgcagcgcagacgaaatatcggagtggcagatcaggtcggaatacaataaagctaaacaagaaagctttatcggaaagcaagacgaaaagaagtagctaattaatgcatcgataatatcggtattaactgctattaaaatactagttccaatacaacataatgctacgatttcaattaaattgacaaacattctctactataaaatatttcaaaagctcctcattacttttcaatttaacgtaatggtaaaagctttcaaagtaattatttacaaaaaagattcatggttttgcataataaacatgaccgttcgtcaatttattaatcattagagtagcaatcatttattaatcaaatatttgtttgtgcactttcttcaggtgggacgaagtgtactcccttcccattgataaagtcatcggttgataaacatgacaggcgataaacattgaggcgaataaatttaacaatagtctcaagaattactaagtcgacgtctgggcgaccaacgaaaaggttacgccaaacggatgtagccaaaacagcatcacttcccagcattccttgatcataaccaaaaatggcgccggtctgttgctgaaacagatctttcagatacataccagaaattcgattgctattaatgcggtaatctttatgaattctgagttccatgtcttcaaagaaacgagtagttaatgcctgtgaaaaggcaactttttcattttttggcaaaccacgaatgcgagtatggaggatccacaaatgtaattgcgttatttgaaaccaagactgaaatgtcataggaatttcacacttctggtaccaaaattcaaaagcacctagcgagtttttttcgggggtagcttgtcgagcagcctcaaaatacatgtatcttgcagtaccagtagcctcataatataaattttgtttaggagagatatatttttgataaataagacttattttctttagaaaactatttggcggagccactttacgtggatcttgaggaggtgtaaggggtttgtatctgagttcttctactgggtctcttctcttcgtttccgaaggtgaatgattaataacatttattggagaaaatgaaaatcttcttcttaagggaccgtatatactcttcccccataccggctgcttaacaaatgctggtctcaatggcaaatttaaacagcagcgactcattactgaatgacgataaggatcttttgataatcttttcttaattaataaaattaattattacctgcaaataaatacgtaggagttgggttgaaataaaaaacggatcgattaatgtcgtacaatataaaggggaagagaggttgtgacaggttgattgccaaatacaatgttataacgaacgatcaatattacgaggccatcattcttcctaattaagtatactctaaaatttactggaccattttaaatttgtttgcagtttcagtagtatatcttcgccgtttaatcgtaccaaagattgtatctatttattttgctttctcaattagaaaacctaaattaataacctcttagttgaaaatgattataaatattaccatgaactaaacgtaataaacttgtaaattgcttcaacactcattcgttgacaaaagttctaaattctcatgtctgccattagcgaatcattttagcatcaaaaattcaatttatagattttatggtcaacggtatcaaggcgctcacttaaccaattgttatcatctagcaatgcagctttgtctccccccacaggtatttgtttaataattttgtcgtaagtagcttgctttttacggcagtccttcaagagaaaatcattcaacaaatcaatatatatcctcgtctcattcaatcgaacatttaccttgtctaaacgtacgacaaggcgtgctaacaatattaaatgaccctgaacaactcgagctctcacatcaaacattgattttccattatctgctaactcatcttcgaaaagaattatctcattgaaccataaattttgtcctgcgttaagtattttttgaacaggtattacctgatcaatttcaatgaattttgcatttggacgttgtatagttccctgataatcagtataataagtccaatcaaatgggtaaatcacagggtattcttctccgggcttaattctggatttggcccagtcttttgcaaaagaaacttgcattacatcttcaggtttggtaccaaccattttaagagcatcttcagtaaaaaatccaactacaggctgattcttgtattcaattgagatgtaattattcccaaaggtcatctcaggaggtggaaaacccaatgtactttgaaggttctccatctcatggctttttaaaattgacccccgttggactttgatagtccaatatttaaatgaaaaatcatcttgtttttgcatctcctttaaataatgtgatttgagtagttgcttgacccctatattattgtaacaatttagagtgcgtacggcaaaatataggtaatgtaaatttagccaacacaaaacacctttatattactttactcattatagagtatattcaaaaaaccaaaagttgattaattattcagattaaaaatgaaaaatgatctataagtattaattcagtagttatataatttcagttcaactccctcatttagtaaatccgataagtaaaaattattcaaaaaatacattaagacgattagtattcataaattcagatattaagccataaaattcacgtattcttgtaaccataatttctcagtacccctatctagagcaaacgagcgtgaattcatcacctgaagccatttttggcaaacctttttagagtccgcaaacaactgaacatgccttctatcaacagatgtagccaatattccagctactagaccgaggtttgaaactgcctctgaaaaatttaccattgggattgaaactactgtcttagaaagctgaaaagtatccaaatattgcccacctttttcagcataaaaattcagctgctttgagcgtaaaacgacaaaacgtcttcgaatagatgaatcttccaatctatacaagtatccctcattatatagatagttacttctaacgtgtcgcaagtccatcgtagcttgttctaaggtaaatggcaattcctgctctggaaccgaaagctcaggaatatacaaacaagtcaaagttagattaccaagtgtacgtttccctatagagtttatttttacaggaatcgcttccaagaagcctctggaaatgatgggtatttctacgttgaaagcctttccaaaacaactgtctttgacattacccaaatttaacgtagcagtacccgagactttcttgataaccactgacttcttagcctttgaattctcaactgcagcagccttgttgagttttctctttttgcgtcggttgaaaagcttgtcaaaaaatttcctagctttggatttcgtttcagcaggcttaccgtttgaaacgtcttttgtagcagatactcctttcgaaccgttggacttgtcctcaatagggatgtcaagaaacataaaactcactttaaagttatcgtcaacatgaaaagcaaaatcatggtccaacctattattcccattaacagcttgccaaggaagctgcatattttgcgtaggcgtattaactattatcttgataggtgaatggacttcacttatcgaaatattcaaaatgctgttcaaatgtatataaaagcgaccaagtggcaagggcgcctttggtttctcttcaaaaaatgtttcattcacaaatccaagagaagtaacaggacgtggtgattgattttcagtaccattcgggacttcgtaagacgtactcttatcctgacttggaagatcaaggcgattcaaatcaaaggaatgtgcacgacttaaaagttcgctatctctggctacaggcgtagactgcctaagttcatcaatgctggcggatatctcggcactagggtcgtaaaaacctactgtaccagtttccgaataattccatccttcgacgttatgggactcagaactgactaaactttggctagacttgtttggctcattttcacaataattactataagtacgcttcgttcctggtacgggttgcattgatgggtgacgtaaatcttcagagcttaaaatagcactcaaattgtcaatggtagaactgctttttatacgaccacgttgactagatatactatatcccacggaagcagaagttagattgtatctggggacttcatgatacgttacagatccatgaccataggcggcctgagatttcggaattgaagtggcactaatatcctcatccatattttcctgttgtaaagaatcattgataatagtagaaatctcaggttctgaattacgggaagattgaaggtataactcatcatagtctttaccgttggtgggaagggaaagctcagagaaatcataaactttcctaagtgtactagcataggaagatccactggaaatccgttttgcttccatcttggccaaaacctttttacgaagactttctgtagagatatctgagtcgtctaaggtggcctctgggactgaagaaaaaggctctgaagtatcttcaacaggggcttcctgaatgggagctaaaggttctaaaggtttataatccatatcgagagacgccgtcgtttcgaccctttccaacgctggattgtcctctgtggtatctttgggaagactaggaagaatccttggacctacagtagaagatgcagatagatgtgctggaggtacgggcttgacatcagatggtatgcgagccaagttgggaacgcttccagctcttgctcgggctgggtttgtagacagttcattatgggattgatatggatgttgaacagtgtattccaacggagacattgtcttagctcgactaaattctgctacttctaccgccctcttgcgagacgatttggagcggtcaaaggataattcagctaaattttgatccggattaaatgtttcataatctgcaacaatatcagcacctttcaaagacgcagtagaagaacttgtcgagttcatagttcctgccgagtacgtcaaactaggaatgcgaccttcttcctcggaattaatcctcttaaacactgatgtactactcattcttttacgattatcaggactatgttgagaagaaaaagatgaatcgaggtgcccatagccatgcatatacatgcttcttaaatcaagtgactctaaaagatctgtcgcaacgtttagttccgaaaggtttccaagggacatatcgccatctccatgtgtaaagttttttgtttgatcatatcccgaggtttcattactgttaccctcaaaaaaaaggggtgttttttctcgatttggagaagaaagaaaactgttttctaagcctttagagtcaagagacacatcttttgcttctctatatgagaactcttgctctttcatcgtcaggatagcttaattagactttacagactataataccttatcgagtgttaaaatgtggacacagtatcatataagcaccctgaagtacaacaaaagacgagccttcttctttatagcaaatattaattcaaattctattaaaattgatgctaaaagcacgaaaacctcttataatttattgaaatccttcttcacctcagtcatgtggagtaggcataggtcacacaaaatcggtagacgctatgataagtggtagtcccagtgagaacactgattatatggttaaacaattcaaactctggatataccataaatcgaagattaaagccaagtttcctttttaaaattaacaaaaaaaggctagttgcattgcaaatatgaattatagctgggacatacttgcaaagataatattgtattatcagtatgcttatgaatagcgatgaataaagtcattagtatgtaaaataaaataagtaaaatcatattttgttgtctgctattttcgcagaaactaaaaaaaaatacataaaatgaatctgttgataaacagcttttaatttacaaatacacgagcagttaaaacctaaaactaactatcggggcgtaacatttacttaaagctaaaacccatacttttgagaagatgcctttttgtttgatcgttgctgctcaaaataagcttcaaagttgtctttttgactgatagccatttcaacaagagaagacagttgatgacgaccaggtgcaacacttttaatagtaggggcgcttggcaatgcttcttgggtcggttttggaagtttgttgatatcaacgtctataattcgtcccttctcttttcggtggcgtccaatttcaatgtaatcttcattgataatgtttatgtcctctgcatttgaatgtactgagtgattagcaatagaaatgaaatcgttctcgggttgattcctcaatttcggaggatttgctctagctttaggttttatcaaaattggttggtaaggtttctgatcggaatctactaaagaggcttgctttgactctgatcctacgatattaaataacgaaacgttaccagacttttctgaatacgttgatttcttgacagtttcggaggatccagtagaggttaaatcgcttacagagttattaggtaataaatagttttcatttaaatcaaggtccgatcttttagatgactttggagctaattcagcttgattttttggggcaggcaaaagttcaagtaaatcattagatttaaatcgttcattagagataacatcagattcattaaaagttttatcattaaaagaagatttctgtaaatcaacttgccgtttcaggcgtttaggtgactttttagtgctgtcaaccgacaattttctgcgcgcatgctgaaacaaagtaggatcgaaacttttagaagctaatggtgtttcttcttcaatatcgctttcggattctgatcgaggatatgaaaccagagacatattttattaacttttgatattaagtcgtttaataattctgagcgagcgatttgtactcggtaactattctcactgcgaacagaattatttatggcaattaatatactcgcatctgcaagatgatttacatatttattcaaacttaaattaattctttaagtaagtcttaaaaagaaataatatttaattgaatgctaccgcccaacgttgctagctagcatatgtggtattttatatattaatcacccaaaaagattccaaattaccattaatttaatttacttttataagcttcataaatatgagagtttaaagcactgcaattttcgtaaacttaatttttaggataggccaaaacatggccaaatcttgaagactggaaaaagtaccgactcgaatacttttatcaatcaactgttagtagtcgtaaccatggtatcataaaccgaacatatctcttcaaatatatcaatttatgacaaaccacaatacatatttaaataatcattaacttgtccgtatcaacttttaagcctcatcaaactgacgattagcaagttcaactaaatggtcccaattgacatgcaatgagcaccaagtttctactccagcaataattagaattgcagctccaattccaatccataaaccgtacagcccccaatctagcttgaagcaaaggattatggcaacaggcaaacccaataaataatatgcgatgaaatttactaccccaccaatcctttgtcttccttgtccccgaagaaggcctccagctacacattgtgtattatcggcaatattaatgagtgcaacaaggggaatgatagttgcaaccaatgcgacgacatctttatcagacgtaaaaatgtaagtccatgtgttgcgagttaaaaaaaggattacagcaatgataacaccaattgcagcacctaaattgatagaaacgtgcgtagctagcttagcgagtttcgtatttccagcaccaattaaatttcctactcttgtggcagctgcagcagcgacaccgaaagccaaattataagaaagggtcgaggtagtagacaaaacagacatagaggctaattcagtggtacccaacacgcccgatgcgaaagtaacgagttcaaaagcccagtactcactgcaaatcataattacaccaggaacagccaatcgacataacgggccccaattttttaatgcttctctactaaaacctccccatgcttgtcgtccgtttaccttcataatatagataattagaacagcacaagcactccatagcgttaatgctacagcgaccggtgcacctagaaaaccgaaaccaacccagggactccacacaaaaaggtaattaagaaaaatattaataggtacaacaattgctaaaatgtatgttacaggatgaaatataccttgcacctgaaggaaacgttttagtgcttcaaataatgcgtatgccggactagccaacatcattactcgcatatactttgccgcaaacatacaagtaagaggatcctgtctaaggaataaaagtatgccctctattttccaccatatcaagaaaatagggaattgtatcaacaacaatatggccagaatcctctgtaaatgtaaacccaccatttcgtaatttccagatccgaaactttgagttccaacggtatccaaagcagatacaatcccctgataaatagcaaaagccgtaattgtggcagtcatgttagacagacttgcagccgcaagctctgttttacccaagtggcccaaagagaaaacagtagtaaccacctcaccatactgaagtaaagacgttaatacaacaggggttgcgaatttaataagtaatgttaattctttccaccatgccttgctattaaagtcttcttgtactgaaaggccactcgcaatagattcgttttcttctgtttcctctaaagcgccatatgatacatcagtcgcaggtctttgtaccctaggtgtaggctttcttaaggaagtagtgggtctttcttgtggaataggtgaaacttccgaagctgcggtgtcaagaaattggggtcttgacaaaccgtaaacaagactcgatcttcttcgtttaggcttataagatcctaataaaggatcattttccccttccattatggatatgtctgataaagttaaaggaaaagggggtcaagtttaaaaaacttgtggatgctagtaaagtttgtgaggccaaccgggcacagcttatatagtgacatattacacaaccaaaatttccctcagttataaaaacgtagtatattaaaacaagtcaatacattgaacgttaatttattgaatttaaaagcattcaaatatttagttaatagaggtggtgaatcccatgaaaaaatcaacaatagattgaattagcgaacggaatgattcaaatgtacattgttcaccttcggatataccctgaatagtgcaagattttagttttttttttttaaataaatgctttaaagtccaactaacaatgacctaaattaaccaaaatttccaatcttaatataaatagtctagtcaactaactttgataatcaacagcttttttgtgtcgcagagacatactatgcgagctggtaactaagttcctttttgtattaatttccttttctttctctagtttcaattcacgattaactttatgtctacaaggccaaggtaatgaaaagagtttagaatgtctaatacatttcggacaaaatgcactcgaattttgaatgtcttcattaataaatgtctggctacagtttgagcattggtaaacctttctttttccatgtctttttttccatagatcttcacgaaattttcgataatcatccacattcagtaacggactatggttcgttatggccatctcagacaaaagccttttttctcgagaccacaccctttttttgtgccttggtataaatagtgaaaactcctcatccaaatcagaactggacgcatcactcagttcaccacctgaatcccaaatattcaagaagctacgatcttcctcggaaatcacgtaacgatttgactgcggcaaagaagacagatcggaaacatcagaactactcttggaagaacaacttgttgaagtagcactagtatggaaaagctttttaaaaccattgatgcccattcgttcacatgagacacaaaggcattcacaattttcaaggccaaagtaattagaagaataaaaggtagtaatttcttcacctggttttatgtctcttacacagcgcagccaaatgcgcttaccagaagtgttaaatcgacagttagcattgcagtcatgattaacgaatcgtgcagggcccaaaaatagacacatcgaatctaagcggcttgaatgaaggatgctaaagtcttttccaattcctatattccgctcttctttaggagataacttaataattgttccacagaggtctgtaatatcttctccagcattaattgattcacgcgctattacgcaagcttcaggctttgaggaagaaaagtattggtttgttgaacaaatttcaaatttgcatgatggtagatataatgagaggtagtacttcagatgtcgagtaaatgctagtaaagaagtgcttgacaatctccgcaacaatggatcaagttcacgaaattgcagaatattttttgccgcttggtcaaggtctgtttgctctataatatatttggttataatatttataatagaacagctttccattcgctcaattgatcgatccactaattttcgtactttatgaatttgggaccaataaaacaccttgtcaactagcaaacaagtacaaacatcgtcaaaaagagaaaacgtttcaagatgagtattcgtctggcgcattatgcattttcataggcgttaggcaggtatcaaaatgtcatgaaacattcaatgttaaaagtacctttccagttgaacaacgatgagtaatcttgatgtataaattataggtttatatgagtttgctcagaaaataaaggttaggaactcgatagtttatccaaatatgtaatatatttctgcgttggcaaatacaaaaatgtttttgaacacaacaattcaacacaatcacttattaggaaatcgactaattagcgaaatttaattattctcgttttaaataaaagaatccacgaaagtctgaacgttgtaattaaatatacaccaagctcggacggtccccttaaaagttttcacagttttctagttattatatctttgtaagttatactaataaagagcgactttgcttcgaatgaaatccacctagacaaatgggtcgtagaaatagcagtaggttggaccgggactgatgaagttaactaaactatactagcaacccaataggcgaatgcagatacaaaaaacttcctaaatcccgttttatcattattgagataccagtttaatttacttccttctaatattcaagtttaaatatgaagttagccatcggtaggcttttaagcccattatttttgaaaaatcctcagaaacccttgatcattactaaacgattttattcgacacccggagaacgaaggataaaggacatactcactgagaagctttcacctagttctttgagagttatcgacgtttctggaggatgtggcagcatgtatcaagttgcaattaaaagcaaagccttccaagggaagaacactttggcgcagcaccgtctagtcaattctatcctcaaagaagaaatcagaaatatgcacggactgaatttgtctaccgaagtcgaagacgatatatctgccggcggatcgactacaagttcatgagatttgtttacaaagacctctctgccgctacgattttactgtttaagaacatagttgtctgacatttattttcaaattagatatgaagctcacggcttttatttatttcaacgttttcctaaaaaccttggcttctcgttcatacaatgtaacataaaactttccttttttgttctcagttaatacatctgttattttcgaatattattatattatgccttcgatatgatttttgcgctatagacttctaagtgtgttttctagaatttaatattcaaaaggtaacggccggggaaaacattgatgtgtatttggagaaaaaaaactttttccgcaagtcgttgagtccgtaattaccattcctgctaatgttgctatctttactacacttaatgtgagtcaacattctcttccgaaattaaatttccaaaagatagactcctttcgactaatgtataaaacatattgattttaatgttgatccgtcgatggaaaatttctcaacagtcactgatctctgaaacgttctcattctcactcataatacaacgctatttttcaaacaagttacagatatcggcttctttttagatgatttattcaacaaaccaatgcaacaccatatggctaattcttttctgaacctttcggtttgcgaagtcatcaatctcgaccagcctcggattttttggtcagcgattttagcatgataactttaaaattgttaaaatgactttcttagaaaattatgatataggcgcatcgctttttatcgcctaacggatcggaattatttctcgcaccggcgatttgaactagctgaagaatttgccaaacataagcggaaaaactcgatttggtaccaaacttcacattttcaaatcgcccggttagttagtttggccatcttgcgagtatataaagttatcaaatcatgtcgcaatttcaagacttgtatcaccagaacgcactaccacctggcagacacatattttgtgcagctatttcaaactactagtaacttttactatacatactctgcaacacaaatcaattaattagctaatgaattcgcatttccaacttcaactcttactactatagtcgcaattgttcttttcttgagtttcgtaaatacggattacgagattcataaataggatcagtaagtgaaagctgacctaacatcagtcatttgttattttcaccattaatcaacgcctcgaaaggggttatttttttcgaattggagttggaattctctgtggatgctcaaagcacctgctctttaacttatttttacatttaataccataatacgagaacctctgatttcctttgggaatatccccaagatttaccttccctgtcaaaccgccaaatccttgctgagcatcaaaaattcccgccttattagactagaaaattatcctagagcttcttgtttcaattcacatttacttacttactcatcagccagttggttatattttccttctcttacaactatttcgttcagaattttggtctattctcattttctacccttcttcttttcttttttgcatcctatttattctattaatttgaaatgcctctaaaaagtatgtcttcttacttcctttgaatttgtatagtgtgctaatttaatttacaaaagattatacaaagactacgtctaaaaaagaacctaaacaattagatattgctgcttctgatcaacaaattgagcagtggagtgatcagatccacaaattagataaagcgattcgttctacaatcgataactctcgactcttctatgatgcttggagatgcatggtttgtatagctccctccgtcactgcctcttggatttctttgtacagacagttacctcctgaaaaacaacctgctgcttctgtcggaacattggtcgattggaacaaggccttggaacgtcaacgtcgtgaagtcttgcttgccctgcaaaatttccatgtcatagttattgctccttgcaaggaggtcaaaggctatgtaaagaaggcagttgaaatgattaaaagaagagataaaaaagtaaaagaacttgaaaaaattcaaaaagaattattggttgtttacgaattgcctgatcctgaaaccaaaaaaagtaaaattaaagcattacaaagccagcttgtccgtgtcaatggtgaattggatgaccttcagaagcatttaactttgtccttcccaactcttattgcaaaaagtcgtgttttttttggacaacttatgaagcatttttactgcttgcaacttcaaatgtttcgaaaaatgcacaacattgttcgcccttgggattgttttcaagacgatattccccaaacgtggctcgttgagttttcctcagtttgccaggctgctgaaagcatttccttaattgccgtaaacaacaaccgtcctcccgtagaacttccaaaatctggtgatgttttatcaaatagagagtgggaagctggaaaaattgatgccatgaattctctcatcgctcagaatttgcatacttcagcgtctcaggtaagcctttcgcctatggctagtaccgctagctcttctgttacaaattctcccgttgacacacatactccttcaactccaattatgtcgcgtcctccatccatgaaagccctttcttctggtgtagagtcccaagatgaatcggttgctagtagtaattttcaagttccaattatatcgaatccgctttttaaatcccctgcaccttattcaccaacatccgttatctccaatcattcctccaccggtaaatccctggtgatttctgaatgggcataccttgcctcaggaagtgcgaatgtggtgtttgagtatgttggtaaaaatccttactttcaagacaaggtaattcgtcttcgacgtcgaggacaggtttttactacagaacaagtttatgaatactatcaaaatgtaatttatcctttgtttgctggaatggaaagctttttaattgaggtttttttgcagccagttactagggattttttgctggcggcccaaaatgcttctggtatttatttaaatttaaatgagcaatactgtttggtaatgaaagatctcaaagatggaattgaaatgaaaccaaaatggttgactcagtcccctgccgctccacctgactgggttgtttgtcgaacgtgtgcccttagccgtatgcgtggtagacccgttggtttttgtcctctacagcttgatttcaacaattggcccaagtttttgtgctgtcttcaaggatttgtgagtcctgatatcgcaatgagattgtttcagtctggtatactacggaagcttcgtgacctacaagagcaatactctcgtactgatgttgcgttagcgatgacccttcgagatgtgactttatacattggtaaagatcacataacattactagatttagatcctaaagacatgaataccaaaatgtctaaatgggaacgtgatgaaaggaatttgattgaaggcggttggtactatggtcgtgggatgaagtctactgacaaagcatgccggagcagcataaagtaattatctcattgttaattttttttctaatatgtaataccaccatcaatttgtggatttattgcaatatttcaatacattatgcatttttgttttatttgttatatgcctgataattaacagggagataaaagcataaaaataaagggttagatttatttgttctcttcaactaactgttgaacacttaataattctagagcattttttactacgaggttagtttattttctaattattactaatgaaaaattaataagatccattgaacatattttagatatttgatgaatgatcacctaaaagttgtagttactatacttaacttgccaacccccatctcacttgcaccttacttcacctcaagtataattttaaaatacagcatgtttcgcatcgcatcacgccaaacaagaaatctgtaagattgtaattatttttaattaacaaatttatactaactttaaaagacgtgctttatcttccagtaagaactgggcaagatcgttggtaaacacgcgatcatttcgagctgccgcatctgtacaaaacaataatgcccaaattggggaaatggttgacaaaataagctctctatcattgttagagacgtctgaacttgtaaagcaattaaaggagaagttaaacattgctgaaatagctccgatggcagcagtggctccagcagtagcttcagccgctccttctgaagagaaagctcctgaggaaaagaaagaggaaaaaaccacctggaatttgaaactcgaatcgtttgatgctggttcgaaagccaaggtgatcaaagaggtgaagtctcttttgggattatctcttgtggacgcaaagaaattcgttgaaagtgctccaaaggttttgaaagaaaatattttgaaagaggatgctgaagctataaaatcgaagttagagaaactttcttgtaaagtagtcctcgaataaactgggttgtttataaaaaatttcatttctatgcttttccgccattcaaattctttgggcaacctttttgttattgctttgacattgtgacacgatttactttcttggattcccataaaaactaagctacggagggaaaattcatcatctctaaaaaaaccagatattaggtaatgtataaaatactccaaaattattagttaattatatgtttttattctatttgggttacactctatgttttcgctcttcggttcaggaagttgcatgaagacattcattaaacttttcgtattcatcctttagggattccaaatcgctttcagtaattccttgggtagtgttccatgcaatttccgcttctaactctggttctgaaatagcccaaatgttttcacgcattcttttgtgtcgctctctgtcttcttcaatcctcttaagaatgtcgttttttgaaatggctcctgaagtactggtatcacctgacttgctcgcttgttcatgggcttctaccgtagccatagcatctttatattgattatcatcgattaccttcttttcatgcaaagactggagtacttttctaacctctggagcgttagcagctccagcagctcctataggagctacgttctggactagcttacagatatctctactaatcatattaagatatccacctgtaaggccattttttaagcacatctcacagagtgtgtccacaaagtacatgatattcactcttgtattgaacgaacctgactctagttcctcccatatacatgaatataagtcttcttccaagtctagatgcttaattgcaaattgcgcgggtttaatttgagagaattgcgatgcattcaattttcccaaaagctgtagaaatgtcatgcggccctcaaatggatccattttattattgcaagtatattggtaattgcgagtgcaacaacgatttttgttatgatggtttttcttatacttcgtgaactttgaattccaaaaacatcaagaataattttttaaataataataatgtgtgttgtcttaaatttcaaatatagaataaacttcctttgccaagtgttcatctattcttgaagctgcaatctctgaaatttgagactaaaaaaagcgttgggatactattttgcgaaaggacgttgaacctttccagattcaaataaattaaaatatactcagtgcataagtaatattaagaggtcttcaaactgttagcatgttgcaaaatctgttgctttaagtagcatgttactttatttcaaacactattactgtacctttaaagaaactaaaatctcattttattaaatactacttttttagtaatttcaacagcgaaatagtaaattttcaaagatatttttatatagccctgataaagttataaccattcaccaaactgttaggatctctgagtataaatagcgggaaagaataactactatactttaataaaagcacaaaaaccgaccttacttatatggtaaaatgaaacccatgaatcagtaaacaatttttatttttttatacgctctactaagtcgtacatacaaaatcaacatttcctttcaataaagaactgctttgaaatctaaaatggccagcgacaaacttataaggtttgcctaaaaagtaaatataatggagaaaaatactctcgaaaagagaaaaaaaatgcaggatgtattgttcaaggagaaaaatataacaacgggataatgatataatggaaatacacccgtcaagttgcaagtaaaagcgatcctaagcagaataagcttctacaaactcaacataatcaggacttaactcaacacctgatccttgagcctccttgatagcattgcaagcttccttcaagtaattatcctgactagcctcgtcttgaacaatttgagccagatccatctttatatccgcaagttttaacaagcgttcaggagatttatccagagtataaataacattccaggtatcgacagaattgttgagccagctggaagccttgttgattaggtcatctacattactttcactgttgtcgagcaaatccatataatattccgcgaaggtagtataattatttagaacagcctcttgagcgattaacttataataggcaggagtgttgggatcgacaacagattttaaccacaatgcagttataattgaacagacatcaaggagaaaagcttcagagaattgatcaccgaattgaaagaggtaggaagagagaatgtataatgggcgtaaagaatcgggggtaagagcatcaaaatattcagtggaatcctgagcaagaggacgaaggtattggatggccttctcaatatatgggtttaccaactgagtgaccgggatgttggcaagagattcctcgttatcgtgacgccaaacaagaacacgtaccttctcaaggtaagcacgagcaagagcaaggaaaagtctcgattcgttgccaggagcatccaagccaagttgagctctctcgattgcagcatctatgtaggattcttcggtattggtttccttaagacgcttttgtgcaatttcgaaaagctcggacacagccaaaagagcggaggaataggccgcgtgaaagtccttgggtaatgtagaaatgtcctcggtattccgtaatattctatcagcctcgtgaatggtaccaaagacaaggctcacactagcatctatatcgtcattttccaacttttcgcgactcatctcgtataaaccccaaagttgtgaaatattgtcttcctctgtgtaaacaagcattgtctcatcctccatttctccattgtcgacattttcgcttccgttttccttactaggagacgagtttcctgacagctcataagaggcttcttgcttttgtttttcaagctgctgctgcttctttaaagaagcagcagcgcgtagaccttgaggtcttcttccaatcataacgaaccgttaaattaacctgttttgctaaggcagcgttgacatcgagtgattttttctacccaaaaatcgcgcgggaaacttgttagcaagttacaacgtaatgtggtattgttgttgcgttgtcggccatgtgcgttaaacctaataagagcatggcgtaacaaaaacaataccgtcgttttgtggctgtggaaaacgagttaccagaagcttggagaacttgacatgttaaaatgtattagtggaaagtatagaggctcgtaatacagtcgtacatattgacttgtttacaaaaattgatgattttaaattgtgaaggggaagcttattttaaacatctaattatgcagcaagatacattaacacgttttggattttcattgttaaaaaaaaagagcaaaattaaaaaggagatggaagaaagtaaagctttatgacttcagcggatctagagcaattgaagtaaacatatctagccgaaatttaacttagtaaattgattaagataggtttctgtaaaggagatctatgatattcaaaatgcggcaatatttcttagggcttatggcgcaaaaaggtgctatacaaaattgccagcacgagataacattgaagatttggcagttttgtaatgtaacgctaatctttattaaacaataatataatacgaaatcgcaacttttatgtggttttgaccgtttctttggcagggaatttgaattcgtttcttagtttttgaacgatatctgatcaacgagtttgtttattttaatttttttaaacggctgctttatggtaatggaccaagattgctccagcaccttaaaaatacagcactagtatatatatttcggtcgccatatcaataaattacttgattcaggtgccgaagtaataagtacttaggatgaatgtactagatgaaattgaaagtttgttagccaattataaaacaaaataaagccttttttaccatttgatgacagaatttctaatttttttaatattactaagttatcttgaacaattagtcatgtccgaggctcggacataacaacatgctagtttataaaagcactacattgtttcacacagtaaaagaatactcagatattcatttacattattaacatcatgaccttgcctgaaaaattactgaagattactcccaaaatcctggttattatgggaagcgttcgcagcaaacgcttatgtccaactattgcaacgtgggttggtgagatgggaaaaagagagactaattttgactacgaaaaagttgatttaactgattggcctctatctatgagcgatgaacccggacttccaattatgggaatagatgtgtacactcaggaacatactaaggcctgggggtccaaaattgctggagcagatggttttgtttttgtaactccgcaatacaatggtggatatcctgcaatccttaaaaatgccttagaccacttgtatcacgagtggaatggaaaaccgcttttgattgtaagctatggtggccatggaggaggagattgtgcttcgcaactaaaacatgttgccggttttcttaagatgcgagtcgcgcctaccatgccagcgctcacgttacccagagataaaattgttcaaggtgtagtcgacccagcggttgaatttacaaagcaccttggtgaacttaagaaagccttcggtgagttttctcagttgtttgaaagcaatcctgaaaggaaaccctagataattaaaacataagagtattttgaaagctagtatagagtgcatttaataaagtctgttttttgtttttttttaaaaagccaattttccagtaaatctgtttggttttagattttattcacatggatagatctattactgtcatatcaacttaccaatggactctaataccttaatccttcctgctgttcgtgttgcctaatgaaggatttttagcacgcatgtattagtaaacacggttcatattcagtcattgtgtaatacgaatttgttcagcagtaaaagttccctttaaaattatattttaatacaatttcagtgaagctattcgtgtttttcgtttataagaaaaaggacataattactacttgaaaaactgctttgttttgactgttaacatgtcaagaaaatatgtacacacatgtagtcgttatgaataatatgcattataagcattatgatatggtctcgggtagtcaggcctctgaaccttataccagtctacaatactatcggttttaggtatactttgaagggattttagttttcaagacaacggctcaatacacgagactatgaaatatctaaacaaattaactagatttgactagagaaaatgtagaatttactgctaattctgccaaatcttttgtggttccctattttcttacatggtgatacgatctctggttagcgcaatcctttctcttgtctcccacattcctactatctttacattatttctaaatagtcatttcagcattaataatgtacccaaaaatgaaaaatgacttgattcttagggctgcaaagggtattatactttcgctttagcaatttgtaagcgcttactcacattatgaaataataggagaagaagtagaacgtcctcctgtttggattatggtatgtaaaaaaaaagatgattataaatttgctaacgttcttttagaggcaagctggaagatatcttcctggtacgtgcacgacttaaacttgatcgtttgcactaacgagaccatagaatatcataagcttcgtgctaaacaaagcttttttgagatgtgtcaaacacctgaaacggcgtgtgagctaacacttcagccagtcacccgctttaaaggtctgcttgacgcagcaattatttttagtgacattttagtgatccctcaagcattagggatgcaagtggttatgcttgagcaaaaagggccgcattttcctaaacctctggttgtgcctgaagatattgaccttttagaaaaaactcccaacatctcggctaaattgggatatgtaatggatgcaatttctttgactcgcgaaaaattagatggacaggtccctttgatgggattttctggtgctccttggactattatggcctacatgattgaaggaggtggctccaaaacttttgcaaaagctaaatcttggctttttcggtaccccgaggcttcccacaagcttcttaaaatcattaccgatgccacggtttcatatctgatacagcaagtatacgctggagcacaggtatgagttaactctgattattttctatactaattcaaataatatatagctacttcaaatttttgattcctgggctggtgaattatcccccgaagactttacggagtatgcatacccttatctggtgcgaatatgtcaagaagttaagcaacacttgaagaaaaagaaacgagacgaggttcctatgattgtttttgcaaaaggtgcttggtatgcaattgaccaattgtgtgattcaggttacgatgttattggtttagactggacggtcagtcccaaagaggctgtccgtattcgaggtaatcgtcgtgttacattccaaggtaacttggatcctaacattttatatggcacacgcgaaattattgaagcccgtaccaaggaaatgatccaagattttggaggcggaaaacaaggctatattattaatttgggtcatggtattacacctggtgtcaatccagatgatgttcgcttcttcttagagaaatgtcatcaatatggctctgcgtaattattgaaataaaaatttattcactccatcgatccaaaatctcagagtcatttattatgtatttgtttggtgatcggtgtttgttttgagttgaaacttctatttgttggaattacctttgaaaaatgaagacaagctaaagaattccaaaggcgttaatcatatctattccatcaaacattcacatttcaaatcctttagtttagaaagccttagtgcttcatttttttgagtctttagggtagtatattagtcacctggaattagcaattgctgcttagttattgtaaattatttgtcttaaatccatggaagctactatttatttatttttgctgattccatatgtctgttagaagacatgatttaaaatcaaattcatgaagtcctttatgaaaaaaccttacctaaaaattttatagaaagtcctaataaatcatactttcataatatgtaattaagaaataggatcatagccttttattactatttgggaagtcaatttttagtaaagcaatatcttgggaaaaaaaaaaaaaaaaaaaaaagcagttcaagtcaataaaataaaaaaaataagaaaaccttttcccattatcgactgtcgaaagcttggatcgcaagattatggacgtcagtattatgggctaaccagttgcttcacgaactcaattctagtgtaccaatttcgcataacctagtatatcttttaccattgcaacaacgtaactgaaaattgagaactgtcgcttttagacattttttctgtcattaataaaaaaaatttacaggttgctgcaattttgtcttttactttctgtggtttataagctggagttacgactggttgtttacaactttttgacgaacttttctaatttattaccgattaatggacatcacagatcgtattttgcaaaacagaatagtttccaaagttattttttttgttttgcgatctgtaactcttagtttggtgtctgtaacaaggttttctttatttctgttatcgtttgctaccattactgttccaaaatgggcgtataaaatagtcacatactcacttacgatacaattcaactttaaatcattgtaagtctctttgaagtaacattttttttaattcattacttacaatcaggttgttcttgtttttcgtttcaatatgtgtcgtaatccttgtcgttcgatatagatatctcaataaatatgcaaggcttcctcatgaagcacctattaaggaagccaaattgggtcctgataccaacataaggccgtcagaaccaagaattggatttcagaattatctcgacgaagtatgccttttttgtaaagtttcttttaaaatttcatgatttagctaacccctttagtttctaagtgctatcagtatttttggttacctggagaaacctgtttttgttgagttagctagacatatccgaacccaacgtgtagctgaaggtaatacaatttaccttggcgaacaatcatcctttatactggtggttgatggttgctttcaagtatttactgcgccagaaaaggactccgcagaggttgttgaagaagctggtcaaccagaatatagactactaacagaggtatccaatggtgctccactttcaagctttttcacagttctggaactttttacagaattaattcccgaagctactagtaaagagaatccgttcaagtctaccactagttcactaagacctggcagtagcactactacagaagctggtgctaacaatgctagcaaaccgcatatgccacaacccaaaaaagctcgtattattgccaaagcgaaaattgataccactattgccgtcattcctgctaatgcatttcatcacttggttcacaaatttcctaactccagtgctcaaattgtccaagtaattttaactcgatttcaacgtgtaactttttcaacagggtatgaatatttaggcttatctgatgccatattcagtattgagaaaaattttaattctctcactgcgtatgagttacctaattatattcgcagcgatattattgatgatttcaagaaggaagcaatgtctgaacatctttcccaagcatcaaatgagagtttcatagttttaagaagcaaaggagctcagtctagactttccaatcaatactttagcaaagcttttgacaaagagcatggtaactttgtttccgatattgatcgttcaacagcaaatgcaggtgatttactttcttccacaaatcctcattcaacacttctttcaacctcggtgggtccattgagaaaatttcctctaaatcgatcatattctagagaagttggagattacgatatctcagcctctttccgagacggcttattacagtgcatctttaagtctttgggtgttttcaattatgaactaaaagaagacaacgatgatctgtgcactgaaaatgactcatctgaaggtgattctgattctttgaagaaggtggattttcttggccaaattgcgatgatgagtgctacggatagagaagaagtaaagagttcaatcgtagttagtacgaagaaatctactatccttgaatttgctaaagagattgaaatcatcttttacaaaaaagggacgactattgttagacaaggggatcatgcagatggcctgtactatattattgacggatttttggatgctacttgcccttccaaattaacttttagtacctcttatgatacagatttaggaatgcattcttttatgattaaacctggtggaatcgttaattatcaggcttgtgtttccaattatcgttctttcattaacgttacggctagatcagatgttctcgttggatttctacctcgttcttgtttggaaaggataattgatcaagagccattaatatccctaacaattgcaaaaaggcttatctcattagtaccatcattacttttgaaattagattttgctgtcggttggatacatcttaaccctgatcaagttgtttatgaaaagaacgatcccagtgattgcgtttatgtggttttaaacggacgtttgcgttcaattgaggatgaacgcggaagcgctagaactcaagtggattactttaacgagtatggaaaaggagacagtgtgggagaactagaaatgctattaaataatcgcagaagtagtaccctttttgccattcgtgattctgagttggctaaaattcccgaaaccctttttaatgctttgtctttaagtcatcctgctgttggtttacagttgtcaaaaattattgcaaacagaatgaatttgcttcttaataacaaatctatggatggaatgcaacatcaaccacatgaaaaacacagcattagaactctagctatagtcccttcttcatccacaggtttgctcattcttttctctcaaaagcttacttctgtgctgtctgttatgggaaagtcggtgaaggtacttagacaatcttcggttttagagcatttgggaaaacatgcatttagtcgtatgggcagatttaagctttcaagttacctaagtgatctcgaagacaaatatgatatactaatatacgtcgctgattctggtgtgggcagcgcttggttgcaaacttgcatcaggcaggctgactgtatctacattcttgctgaagccgatcaaaatccaaatattggagaatatgagcaacatcttattgctatgaagtcaactgctagaaaggagttagtcttgcttcaccccgaaagattttgcccatcaggcttgacaagactatggttgaaagaacgaccttgggtttatgcccatcaccatgtccaactacgcattggacttgataacgaaatatcccaaaataatgaggctaaggtatttttaaacattatacgagcaaaagtacaaaatttgcattatggctttcgaaagtacattgattggaagcacttgcatccggtgtaccaagcgaatcgtgcccaagacagcgattttgctcgtctagccagaaggatttgtggaaaagccattgcacttgttcttggtgggggtggagctagaggcatttcgcaaatcggcattctatatgcgttagaggaagctggaattccatttgacattattggaggaaccagtattggagcctttaatggtggtctgtacgcatgggaggcggatctggtcccgatgtttggtagagcaaagaaattttgcggacgtatggcgaacctatggcgatttgtactggatgtaacgtatccacaagcagcgtataccactgggcatgaatttaatcgtggtatatggaagacttttggggagatacatattgaagacttttggttaccgttctacgccaataccactaatattacccattctcgcatggacatccactcgagtggttatgcgtggagatacattagggctagtatgtcgcttgcaggcctcgtccctcccatgctttcggatagtggggacatgcttttagacggtggttatatggataacttgacagtctctcatatgcaatcattaggtgcgagctcaatctttgccattgatgtaggtagtgaagattcccgcgagccaatgcattatggagacacagtgtccggtgtttgggccctgatttctcgatggattccatttattcctaaaacatcgtttccttcattggctgaaattcaatctcgccttacttatgttactagtgttgcgacaggtgaaaaggtaaaatcgatgcctggatgcttttacatgcgacctcctgttaaagattttccgactttggaatttggaagtttcgaaaaaatctataacgtcggctacaattacggaaaagagtatgtcgaaaaattgaagacatctcacaaattagatgatattctttctccacgcgatacatccaagcgtcatcccaagtttttgtcttcaagacgtaattctttgtaagaagggtaagatttcgcatttactatgtttaatcagaaccgcatatgaaaggtttgcataacgatctcatgcacgtactctagcaatacttcgaattaaatcattaaacttcggaagcgcttactattatgaataaaattgactattttatgagaatctcggcaaaacctgtggcttcttttagttaatacccagtttgaccgatggtaaataaagttattttttactttagatttatgaaaattacttttcatctcgtgcagctttattttgcatacttatcaaaccccggcatctgcaatattacacgtttaagcgacgagatagcgttatcttcccaacggtattgagtatatatataggctccccccccagcgttttagttcatctttaccttcaacgttagattgaacaccattttaccaaaagatgatacacaagcaatgatcatagaattttatcaaggagtttcgaagatatattagtactaatatttacgagatttaatagcaatactatattgtccattgtttattgttacgttacgttaaataataaaaaggttatgatgctaaagttcgctaaaattatttagtgtaatgcgctatatgtgagattaagggttagatacgaaaacgcctaaccttttttctaccactttcagtgtgtctaaccagaatctattgattttggtaggaagagtatgtccctattgagaattcgaaaagccagtttgtatggcttttcaacagttttcatattattgcagagttatgcggttgcatatcctttaagggcgtttagacagaatgatggaattggcattgcaatgaatccttctcaagatggaggtttcgttagtgctgaaaaggattcggattttgagtattggatgaagctaattattagcgctgttttgattttgttaggaggtgtatttgctgggttaactattggtctaatgggttgtgatgatcttcaccttcaagttcttgaacaaagtggagatgcaagcgaacgtgtacacgccagaaaggttttgaagttgctaagaagaggtaagcactgggtattggtgactctgctgctgggaaacgtgattgtcaacgaaaccttgcccattgtatttgatagtattattggcggtggttggcctgccgttttgatttccaccgcaatgatcgttatatttggagaggttattcctcaagctacctgtgttcgctatggtctatcgatcggtgctaagctcgagcctatagtattattcatgatgtatttgttgtggcccattgcctatcctactgctttgattttggatgcttgtctaggcgaatcgcaaagcactatgtacaagaaatctggattgaaaaccctcgttacacttcatcgtgatttgggaattgataagttgaatcaagatgaagtcactattattacagctgttttggatttacgagaaaagcatgccgagagtattatgactcccatcgaggatgtttttacacttcctatggatcgaattttggatgaagacctcatcggagaaattatttgtgccggttactctagaatacccgttcacaaacctggatttcctcatgatttcattggcatgttgttgacaaaaaccctgatcggctatgatcctgatgataaatggcctgttggcaagttcgcccttgctactttacctcaaacgtggccaaatacatcttgccttgacttgttaaattattgtcaagagggaaagagtcacatgatccttatttcaaatagtcctggtgagcctcatggtgccattggtgttataacacttgaagatattatagaggagctaattggtgaggaaattattgatgaaacagatgtttatatcgatgtccacaaaggcttgcccagagttggtgagaacaatgatttttggaatcgtatgctccatcgttcgcatttgagtactatggctgctcttcacaagagccaacgcagccatgacctggctgccaatgaacatgctccgatattgaatcccaagaactctgctcttaatcccagattagtgactaatgatcgtgtcaaggtgaagagcccttcgcttattcaaagctctactggttatgggtcaatgtcgcaatcaccttctcgctccgatttaccgagcaaaatttcaagagtaaatgcagaattgcaggcgcatggcagtcagcgttccagcatcgatgtttccaaggaaaacaaatcctcagtagctgatggtccgtctagtcaagctcataatggcccatctacacaacctcctgaagctttaccgaacggaactgatccttcatcatcaaaaacaacagaaaacaacggcaaccaacaatcggaaaggactgaatcagctgatggaaaaaaggataattccggaagcatatcatcgaattcttctaagacctttacaggtaagcgtgtaaggttaggaaatgttatagagagtaatgttgtatcacccgatggaacgaatcgtattgttattgaaccatttgagcgctcagtagatcctaataatgctgacattgtggaaatggtagaacgcaatggtattgttgttcccaaggttacggtcacttctcatgaggacgatgtggattcagttcataatacacctatgagtgtatcaagtacactatctgttaaaacgtcatcttcaaaggtacctcgaaataagcggaaacgaagaaaaggtaaaagcaagaaatagacggctggattattgaattagtactgctgataccttgataccagtgtattacaatcgttcctttgtttcatttgtgattgattatttctatttattaagcttactatttgtccattgagccaataaattaaagaaattggaaaagcaaacatacacccctttttgtttagtttgtactgcgattagttttagatttattgctttaaagattttacaaaacaagtttaaagaatgaagctgttttgttcggacctggtaaacattttataatttatcccggctgtttagtccgattacacattgctgatattatttgaatgttttcaactacctgctacgaacctatgctatgctttatgcgtagctacgagaatattacatttttggggggtttttaacttatttaattttttagatatgagaaagaataaattgtccgcattttgaactagtatgaaagtgttcccgatttgcataagagcaaattaaagcttcatttgagatttaacggctgtcttattttttggacgatgtcgtttattccgagtgatattaaagaggcacgctaaggtgatgagtagtaatcttgctaaagtgtaaagtaaatacacagttagatacagggttgtttcataactaattgaaagtcataaattcattgaaatactacacttaaaatctgctaggaatgaatacgctgtactccttccgcctctctattgtagcaacgcagtttgatatatgttttaacagtacgtagtactgcggtgagttacctttgtgatttatttattgcaatacgtaggtaaagcaactgagtataggtattatactatataaactgtattgttacctatcacaatatacttataattaaactgagggacgacgaggttcagttgaagctctatttataatcttcctaatcgttattattatctttttatatagatctatatttgctcttaattctcaaaaaaaaagaaagacctcaaatgattttaacatatcgtatatagtgatacgcaacgtagtatcaaagtgtagtgttttattgatgacactattttaattacagtattgtttcgttctcggtattttctttctcacgcagactatgtttattatctcaaacagtataatcttaaaaaatacatactagatttactttctaagccttagaaaatacgctcaatcaacattcaaaaatttgtatttagagaataaaaatgtggctatcggatttacagagtatttttttaatttcaggaaaataagttttaactgtttttatagaaattggggtcggtacgactgccttgggatttttgttcatgattatggtaaacatgaattctctttcgctaccaagtgaaatggatcatcaaattgacagaataaagtcataatgctaacattttagggaattttcatgttttttgatggacctctattgtcgcttggtaatgtatgtttagtaaacaaacatcctaagtatatgaagtgtccttagacgtgaattattaactttcatttcatttcattgactcacatatatcaactctctattattcctgtataacactaatacgtatatagttattactggtctttggtttttttatgatagcgggtttctccaagtccgtcagcttcttccttcgtaaggatagaatgttaggaagcataagtttctttagtggattattgcttacgttgtttcatttccccatcataggattttttgttgaatgtcttggatttttcaatttgttcaaagtcttttacccattaattatatcgttcctgagaacagttccttatattggaccatatattgaccgtttaacttcataccaacaaagtcctgtataaaattacatcttcatgcattattgtatttttatatatccaaaaaaaagtcctaatagggaaccattaccttacacctatgcacgaaataaatcatattaactcttttcatagaaaagacgcaaagtgtttcagtttcatagccataaaactcacttgaataacaccagtcaaaagtgcacttaacaaccttttccaaaggcttgcactttaaaaagagaaactcgtcagttttattatgagcctttattaaattattttccgggtctgacgttaaactatcgagacagctacatatatattatataacatttaacattggaaagcaaaatcattcaacatttattcgtcaacttaacaataaaatgaatttgttatttaaaaacaaaaatcctaatcaatactcataaggtaaatcattcacacctttactttatcttcgtaatacatcgttgataaccatagtatgcttaagggccagttgctagtaaagaagaatcttcattggcacgttttccatatccagaccaagactcatcataaacgcgtacatccttaaaaccgcactccttaagagcagcaaacaatacagaagcagttacaccagagccacatgaagtgattatgggaacagacttgtctgttaaaccatggctagaaaacaccttttccaaatcttcctcaggcttcggagctgtaataccagcagcagtggtttcggtaaatggaatgttgatggacgtaggaatatgcccactagctaaaccaggacgagattcgggaacgttgccaagaaacctttcatgagcgcgagcatcaacgatgtgaacgcctgcggcatctggactttcaatcacctttacaatgtcatcaaaggaagcaaccagatctttgttcaacttagcaccttcgtaaacaacgggctttggagttctaggttctccagtttccaattcaagaccctcagttttccatgcgttaaacgcattaggaaataagaaaacatgctcatgaccaaagactttaaaggtccagaaaaccctaggagacgaaaaaaacccttttcggtcataaatgataacattggtctaaaatattagtaaaattgaagactaagtaattggaatttctaaactactacttacgtttctgtcaattcctaattttccaacgtaagaggcgaattcgtcagctggaggaagcatatgaggaaggggatttttgtgatctttagcctcatctatatcaaagtattgagcacctggaagacgactttctaaatactccttctttccgtttttagtgtctgttggcaagtaccaagtagcatccaagagaacggttttttgagcattatcctttaatttttgcaatacgcccttaataggcaaaataaaagagatttttttaccaacagagaacattgtttgaagcagagtcttattttgtttcagcgaactacatagacttcgaatttcaagtaatcttacgaaagtacagcgttggttgcagctcccaaaattaattaacgagtcaagtttttggtaaaaccaaatatgtgtgtaaaaatggttagatgcggttgcattgcttatatacaaatattaatttatataaaatgaaaaagtactagtaataagttcgccaataagcaccaagacatcaaaatttttgaaccactagttttctaattaaaaggtcttttctgacactgtcaacaaacatgactctagcattctaataacgttgacaaaagaacgtagtaatttatagctacaaaaagggttgcacgggttgcacataccactaactaagccgctttgagtgttcatacttttctcagccaactagaaagttattaacgctaattttaggtctcaggtaaagcgaatttgtcaagtgcttgcttacaataacattaacacactttaaccaagtactttaacaaaagggaaaaatgatcaaagtaattccgacagccctatcctcaacatggaattgacatttccaatacttttcaagcaaagtaaacccacctagtaataaggataattcccattcaaaaaatgaaatgatcgcgtgtctatcaataaatccataaataaagcttaaatcatgaaaaacttaatgtacaaaataaagggaaataataataaataaataaatgggtacaagattgggtccgaaattttaatggatacagcttactctaaggcgaacttcttctaattaattcatcgtctctgttttagtcgggcaagaagagtgcttgaagtaatcggacctgatggtttagaagtaccaggaacattagtagattgctgcggaggtataagttgacgaggaggtcgccgaaaagatgaaactgcacgcagagcttcattagcaacacgcgtcgcttctttttcaaccaatatgctttcagtctgggaggcttccatgatatcgtcgtgctttaaagtactctgaataccagcactagcaaaaatatcatcaaggacggaatcatcccctaaagtcgaatcagagtttgtcttagtaacatttgactcttgcggtggtttatacttttccatcgatgcaatccccattttttcaaacactttggagctgttaacttttttacctttgtcgtgaattttgtgcttttttcggtcacgagctggaatatcttcagcttcattgccatttcttgaggaattatcctttcgaagtactcgttcagatcccaaaaacatgctgcctgtctcagtgccctcagtcttgttatcgcctaacgtaaacaaatcgtgcaagtccgtcattttaaaaaaccttctttgttttggatctttcaaaattttgttagtcagaaactgcttaaagatttgacgatgataaattttttcttcaatagttccagcagtcatcaaccgataaactactacatctttcttttggcccagtctccaagcacgttcacgtgcttgagcatccgttgagggattccaatcaggatcaaaaagaattaccctgtcagcaccagtcaaattgactcctaatccaccaacacgagtagttagaagaaacacatcaaaatactcatttttattaaagttgtccaccaaatcttgtcttaaagcaatagatgtgctaccatccatgcgacagtaatgaacatccggcaaatcctttaatcctatttccagtatgtcgagcatttggcgagtctgagaaaatagaagagttctatgtccttgttttttccacaaagttagtaatgctctaataaccttcagtttgccagacttttcaggatcaccatagttgtaatcttctttatgtaacaagtactctcgagttacaagatctggatgattacaaatttttcgtagtatatcaattccataaagcatttgacgctttccgttcaagatcttttgcatatcagagccttgcaaaaaatcttggtaagctttcctttgtaaaggagtcagcttacagaacaatacttgttcggacttcttaggtaaatctgcagcaacgtcaagcttcattcttctaagtaaataaggagaaattaaatctcgaagcatgcaggcgcatttataagcggtttgcacttgaacatttgaagcattggcataaccaccaatattaataggtaaggcaaattgattttgaaataccggtaatgtacccaatcttccaggaaatacaaaatcaaataaattccaaagctcggtaaggttgttctggatcggagtccctgagaggataatcctattcacagtacggatttgcttacacgaaatagatatttcagaatctgggtttcgtattttgtgcccttcatccaaaacacaataaccccattcccgtggtaaaatcaaatcaccatatatccttaaaccagcatatgttgtaattaaaatgtggcctctagtgaagacactttcaactaagttcttagcgtatctgtggaatgaacttgaagcacctcttaattttatggaggttttgctttcttccgcttcactttcagaagcgtcagattcatactgtctcttttcgcgtgaagcacgctgtccgctgccagtagcatgaagaacaacaacacgtaatggagcccaccatgtatgaaactcattaacccactgcttcattaaagtcgctggacaaacgataagtgcaggcttttgaaatttgccagagtgatgcaaagacgaaaggaaagatactatttgaatagtttttcctagtcccatttcatcaccaatgattcctccggcctcttgacaatagagttcccataaccattgtacgcaagtgacttgataacggaaaagatgtgggcgaatatcacctgggatggtaaatccaccctcaaaagtctgtccttttttggaaggatgaggtagtaaccactcatctttaccttcaaactctcctctatctttattgttttcagatgctgaggcctgatctcgtaattccttacgattcgcacaccaagcattaagcctttgtcgatataccaaatcatctccatcatctatagcggcagttactactttctccgtaacagcatccacagttacgtactcatctttttcgtctcttggaataatcccatgatcaatatttgacggctccgaactcaaatgaggtgccgtttcatagtatgttccttcagactttataacagcctcacgaatgctagattcatcatcaaaatcaacttctttttgtagtccagagagatttcgaaacggtgtaaccttaccagtacggatgagctcttgtctttccaattcttcagtcgaaaatgcacctataccaggggcatttgccgaatcttcgttattaagtcttctcttaatatcattttcgtctgattgtaaactttgaagagtgtctcggaatttagataattgtttgcggaagttctccttgacacttatttttgtaagtcgactgtctatacgctcatcaaggcgacgtattttttcttttacagaagatatttctttcctgactttttgaagtctcttcttttcgatctctcgactttcatgtgcaatgtactcactagcagtattcgtaacatcgcgttccaaattctcttggtcaaccgaaaaaacccctaaatgggatagatcttcattgacactcatatcctatcaatttcttaaataaagtctcattttcagactcactgcaaatttaagaaaatactttgttgtttggttaagggcaaaattacatattccttcatgctgctcctgttatagcgagaagcaatgaaccacacaaagcaataacgaataaatccttatttctaaatgacattgtcaatgctagataaactcacgtttctgcgcgcggattgtatattcgcagacttttaaagtaatggaggtgcaaaagggtttaattgaagctttttataatacatatccattagaaaaggcaaaagaactggataagagtccactttgttctgaatatgaattattcatcaaagaattatggccttcgattgttgagagttttcataactcaactgagtttgaaacggcaataagattttgctgttatgaaacagcagtatgtgctttttccataatgaagttttccttaagttactaattgttattttcgtgtagcgcaaaagtgagattggattggaggagcgattaaaatgtttatttgcgattttggatctcttagtaatagggaacgaaattaacgaaagcttctgtgatcacctgttgccttttctaatcttggaagagctgatggacattcacaccgtcaacgaatgcgccaaattatatgaatattttgaaaccagacctagcttgatgaaaggtattgtcagcaatcgtggaagaggacccgttttgcttcggatatcaaatgaattactccggcgtctttctcggcaagaaaattcatctttttgtgggcggatcgatattctgctaagtaaggctttcccccctgaagaacggagtggagccaatttacgtggagattataatactgttcattcttttgggaaggtagaactgtcaccaccatccacacccatttcggaccgaacagacctctcatatcacaaaaaacttaataccttatttactgcttattgggatttgcagtgtatgtgctccaaccctcctaaattactagcaagtgataccttacctaagtttatagatgcagctggttctgcaatacaggcattcgaatctatattacaaaatacgttcttcaatgggaagtcaaaccctacaattgatccaaactctagctcattactttctgaaaaatatataactttggataaaggatttccttctaaatatatatattctcggtcgctttttgaataccaactttcagatgaagatttccggttacaggctattttacaattaattattattttcgactttttgcttgaccattctaaagaacgaattgaaaggagaactcttgaaaaatggacaaataaggcggtaattcccattgttattttgtctgacgaagatgtatgttcttttttagactcgaaaaaaactgattttattgattgctaatatgtagacctcaaagttaaatgaattatccaaagaagcatatagtttcttacatactgcccggtgtggttctgtgcaaagaaccattaaagaaattatacatattgagggtaattggaaattatggaaagggcttggctgcccttcccttgaaaaacccctagtagataaagcggctattgatgaagctgtcgaaggcttaaaaaagcttacaaacaccccagtgaaattaagatttgctatgggaaatgctgctttgtcgaggctctgggagcaggctggagaaaatacccttgatgatctcaaaaaggaggaaaggtaccggattccatcacctgagagctttttatctggcgttaaagcagacaagtttgaaatagaagaggcagttagagatgatgacaagcatttccatgaacagtccttggcaacgaagacatggcgtgcctttcgttcagcaattaatagccatcttcaaaacttttcggataccggactaggtgatgttgaattgctttgtaattccattgagggcaaaccgactacatcgaaaattacaccctctattcctccagcttttgatattcatattatagaaggagaagagttattagaggaaatgaaaaagagggagaatgtcaagcacaattctcaaaactttgcaagtcctatgcaaacagatgctgaaggtgatattgtccaaaatgaagaggaaaaagaaagcgttgaggttgaagaaggaaaacataaaaatgacttgccaaaggtatcacctaaacccccaactgagggtgtggacagtgaagtaaacggtgaatctttggttcaggttaataaggttctcaaatcagaagatgataatacatctgaagcttcaaaggacccatcttcacatgtgaaatctcccgaaaatattgaaaaactaaaacaaaatgatgatcactttgaggtcacagaagaaattacttccaccataaattctaaaatatctgaaaagcaagagaataatgttgctgaaactatattggaagtaacatctagtccaaaatcttctgaaaatagtcaaaagcagtcagagattactaaaaagcgaggacgggatgaggaagatgaaccttctgaccttcattcaagccctaaaaggccaaaaactggagaggatggagaaattgtattataatcattaaatcaattacacatatgtgataagtgcttagttatgattgagtcagaaaatgtatatatagttaatgttttgatctagcgtgtttttgtatgcgcttatataaaataaaattacatccttttagtagagctactgtaaagatgaatttcattgtttattgatgggtaaattacgcttatttactaaactgcacacattttttgacagttgaatacgttcacatgttcaatatgaaaacattctaaagtcaaattttttatttttcaacaaatgcaacaataaaagcgggttataagtacagaacttttccaatatcgatggatcagatttgaaacagacttatacaatttgacaacaacgttgaattgtaaaatatgtttttgcgtatttaaactccatcctatcaattcaatactaagtcataacttgctttaccataccacataacacagaaaaattgatgcactatgacaactgagacttcgtaaaataaatagctgaaaactctgcaattgcagaaaatattcaaaaaaattatatcaaatgagttaatgatttgaaacactgtcttcgtatttgaagaatccaattaattagttccgcatgcattatatctttttcaataaaaagaattcatcctaataacagcgtactaaaactgccgtaaacagaataattatttttttcacaaaatcacatgatatagaaactcattaagataaatttttattttttttgtctgagatacttggcaaaggaccatgtctcttttcccaacatttcctgaattcttccatctaaaaatatcagaattagctaaattttttaaagacatataattacctgttctgtacatttcctccaatcatgagtatcccaatagcaatcattcagtcgaaggtgctcttctacacatccacctttttcaagagcagtgtcccatacatctttttcctcttcttctccgtcaggagttttttcaatactatccattcagaaaaaataaattgatgctttataatgtaaaaaatatgcaaaacccaaagtgttttgctgagtaaggtaaagcagcagatatttgattatttaaggagaatgaccgagagacgacagaaaaggtgcaaagacaaataaacaagaaaatacagaataaagcttgtcagtattagagaaaataagttaatagctactacaaaggttttaaatgaccaactgacttcaccgcggaatttgagatcggtaacggggttgattggggtcaatgggtatagcaactgcagggcttttagtattttcatgatcttcattttcaatgtttttaatcgtagatttttgggaggttttatttccatgggatgaacctcgcatcacaaggtctgccaactttgcgtttcgtacttcaccctcaggtcctccaagagaacgaggttttccccattgaactttcagtcgaaacccctctataacaacatttccatcgggagatgccgccgccgcaatctcagcactagaacgagttttaaagtttacgaatgcgcattttgctcgatgagaacacacaactgatttaagaggcccatattgttcaaaatgtttacgaattttatagtcagctagttcatcttcgacgccaataaggaaaagggatgcctaaatgttagcacaatacaatgcgccatcaagcttaaattacttttaagtcgcacttacgatttttttatctttaggaggttccatattaatagacaaggaaacattcccattaataatttttttaaccggaaataatgggcgttctgcatttaaagatgcatcagatgctcgagcctcctttaatatttgcttagactcaacatcatctaattttcgcttaggaggtcttgaatgtaattctcgtttttctacctttttaacaagatttcttgcagcggcgcttgcttcctggctatcgtaggccgtttcgccattacttaacaggcgttgttgattttgagcaaagaattcgcgattaatatcgttagtgggaccgctttcgaccagttttagggctgcatccctcagggcaatcttcatggaacgttagctgactattatagttgaatgaaatattgaacttaccggtaaaccaaattgcaaatcaagcatgcaactctgacagcagttcttatatctggcgcaaccaacacaaatttgagtttttccaggcttttggccgcgttcttttatccaccgaaagattgtacaaggttttgagcaaattttacattcttgtccaagtggctccttagtcatacgaacatatgaattgtcgcccaaacaacgttcacagatgcttggaaattcaacatcctcccattcttgtttatttatatcaccttttggtccatgagacatattagaaacgcaattctcttgcaatgctaatctttgtaaatatgtggtggtgttaaactttgcaaggtggaatacgaagacttttaagacaaataaaattcgtgaaaaacacataaaatttcatatgaatatcatttaaatctacaaatatatataactattaaattcacatatacagtgaagggcagaagactatgtttctgcgaattagattttgacactcttccatcttcgtatacatggaagaatcgccgacgacacgggctgctcctctgcattcacgtagaacttcatcaagtcttataattgttcttacaatcgatccttctaaaacgtctgttaagtctgtgatacggttgaaagacatccctctagcccactcgtagcaaacctccattaaaccaaatcgtggttgtgattcaaaatcattaccttcattaaaatacaatacctgatagtgctcttgaatttgattaactttctcggccactgatagtatcatttcctttcctttttgtaaatgaggagaaattgtgggttcaacctccgttttctcatcgaaaacaaatgcagacaacaatgctattgtctcttcacaagaaaagtccgccaaactgttttccaaaatcaactctgttaataccaattcactggtggaattaatttcacatgcgactcttccctttagtaaaacagttcgctctgcgtcaatatatcctagttcttgcaatacttttatccgttgttcgtaatcaggcagtaactctaggttttgatcggaaatataggaagataagttatcgatattgctttccaattcatactcttggtaagctaaggcgaaatgagtaagaaagtttggagtcgagataattggatttccggataacttgttctgaagaaaatttcgtttttcgaaagcttcacaaaattcaaagtctctgactttactccaattaacttcttcaaaaagcaggtcggaaaactttttaattgatgcaaattgttcactaagttttcgaaaagccccccctcgacggtctctaattccaccagaatcaattcgaaggatcgtattgcagactctttcaataccggaaagattgataaggccatacttgaattggtttgattcatcaaagatagcgttatcataaacatcattgaacgcgtcagcaaaagcaagtaaatccgatggtcgtttgaggttgttctgtggatttaaatatgcaacttccagtgtacagtctgaagcattggttctaatggatgttccgagtagaactccaacagtgcgagtaaaatcaagttgttgaaaaacaatgactcttccatctttaaatattcttttgccatttgcagtagttattgctcggaagtgcatttttttggtatactctttaaaagattcactgctcaataaacaacttttaatttctttcaaatcaacatcagacatttccttctttaaagccgacaacttttcttcaaagctttttattttttcctcgtgctgaggcaccaatgtttggttaacgttttcactaaagctgcgtttaatcatgtcttcaattctaagcgtctctacacgtaggaggttaagtatcatattatatgttaagcgaaattgacttataagcttagacgaaggccccataatcatgtgtctcaacgaagctgtgtcaggaagttctgaacgcgataatataataactgtaccagtgacatcaagaccacggcgtccagcgcgtccagagcattgtgtatactctccgggaagaagatcacggaagttccgtccatcatgcttttgtgtaccggaaaaaaccaccgattttgcaggcatatttacacccattgcaaaggtctcagtagcaaacagaaccttcaccaaccctctttgaaaaaggatttctactatttccttgatgatgggtaacagtccgccatgatgaacggctaaaccacgagaaagcatttctcgcatacgaccgatttgaggaagcaatcgatcttctttttttaatcgagcaacggccttttcaataacaacgtgcacttcacttttttcctgatgattatttaaatcacggttagtaagtgtatctacgtattcctcacagcgtttcttcgaaaatacaaatactattacaggcaaaagattttgcttatgtaaatgaccaattaagtgaacccaagtgttagcatctcttctttcaacagactttgcgcttcctctgccacgcatcatattcgtttgaacgcctctgcctctagcggcaccccgacccctagctgagttcttattatccttagctataacaggtttatcaggctttttcagtgcatcgtttgcggatttgtagccatccatcaaaaaccgaccgtgctgatcaacgattttaaacatgttctgtttcacccagagataatgctctaagggcactggtcgcttcaaagttgagataacataaatgttctttttctttgttcgtccaacccaagaagcaaactctttggtgttagggacggtagcagataaaagaatcaaagttacatgaggaggaagcataataataacttcctcccaaactacacctctttctaaatcattcacataatgaacttcgtcaaagataacaaactcaacatcacgaattaagtcagcacctctatacaacatgcttcgtaaaatttctgttgtcataagaaggcatgagccttctggatttacttggacatcaccagttaaaattccaacgtcttcaaatttatgtttgaaatctctaaacttttgattagatagtgctttaatgggtgaagtatatatagccttcgtcatatgtttttgtgccaaagcaattgcatattcagctactaccgtttttccagcactggtgtgagcagcaacaaagacagagtcacccatttcaagatgataaatagcctccttttgaaaattatcgagttcaaaaggaaagtcaagagccatttccggaacgagttgttgaaaattttctattggtgcactactatctacaacatgagcatagtctggttgcttatgcaagttcaaagtagaaggcggtagagaaacgatgcttcttttgtcaggtagtagatcatcaatttcagaatgtttagaattgacattttttaggtgttcattcaactcatgaatggtgacaaagttacgattcgagcttttcactttcttagtatcccatttttcggggtcaaattcatcgttcaaattgtcagtcgtggatgtcgctgtcatggaaagccctcgggagaaccctggcggtacttgcaacaaaccatcttcaccgtatagagccattttcacggatggttcgcctgctatagcatcgacatcagagtcatctgccagaaaaggaatgttgcttgtgcttccacgaacgaattcatttttcgaagatggttttcgtaagaaacttgacgaatttttagaattaaggtcttctattaattcaggaacctctttgtagcccataattttaccctccaggccatgtctttgaaagcgaatttgcgtacgagctaaagtctcgggatactcatatagtcctttatatgtaatttccctatcccattttttttgcaactttcgaatccagtccttcgataaggctggagaaggcttcaaaaatgtatcaacatcgtaagttgcttcagtgatactcaggtgtccgtcaaaggaatcatcttttattccatctaattcaattttatccttgttagaaactgctacttcgttgattgcatctacaagtttagaagacatggacgatgattgagtaggtgggacttgggtaatagatctaagtatgttatgtcgttataagaatattggtgaattgaacaatagtagactgattatcaagtgatatatagttattttcgacgagctatgctttattattcgtttgtaatgctttcgttgatatatatgagtcgtatacgacttattatgatttactttcaaaaaacctgaatctgcgtagttgtaaaagaaaaaggttggattattacatataattagagatttgtgtaaaaatgcatagcattttattgtactatggttaaaacatattattcgttaccaactttgaaattgaattgtagtatacttttagttggtggtggaataaaactacagaggaaagagcgacataaatttccatttaattaaaatcattcaactctaaagagagggaaatcaagtttggatacaagacatgtcatgccatcatgaaggattagactgaaagacggccagtcgtaaaaaaaataatatattttttcgcaaaacgtagtcaattaaaagcaagctcgcgaattaggctagcccttacttggacctagctttggtaatgcaatatcccagggaccgtgaatttcactaagatatatatgtgagaatttagaaagaaataataaaataaaataattacatactttttaaatctttgaagcttaataaaccaaatgggacatataaacgaaatgaaaaatattaatgaaagaaagacaaacgcaataacaacagatgcaacagcattcaaagcaatatatgcacttatgatcaatacgagggtcataagcatgtcagcgtaaaaagagaaaacctgtaattggttaaataaaagaaaaggccaataaattgcttcttacatgaatgtatttgcgaaaaatggggaatagtgcaaaccaatgaacggcaaaaagaataaaaaaaaatacattaattgacttttccagtcgtgaagctagaacaacagatgcactcagcgccgcatttgttgataaagaattgtgtagcctaaaaagaaaaataattagaaatggaattaattacgatgaagtttccaaagacgtacctgacatgaggtctgatagtttccgtcgtatattcatgaaaaaatacgttcgcaaggaaaagccaaacagcaatagcccaaactgagtcaggagaggtagattttgttaatgacattagaattggcgatagaccagcaagcgtaagaacaattaatatacaagatttaacgatccccatgtaattaggaaaagttctattgttacaaggctttctcaacacaaaatcccacaaaatgaatgccgcgaccgcagaaacatttgacacgaaaccaacaagcgcacaagataactggttcctatagatcgaaacgaaaaccgaggcaaatataactacgcttgatagatgctgggagacaggtaaactatcggccactaaagaccaaaagtcagtgacttgaatgttaacatttcgttgtaagccattcaaaaaagattcatcaatgaagttatctgggtaatcttgtttcctccataaaacctttttccaaggtttctttagttcaacaacttcttttacagaggctttcctgaacgtgttcaagacgagtgatttcgcgaccatctttttgggcgctggagcagcacatacttcatccattcagttttaaagtaatttataaatcaactaaataactacattcgtcctaaactctcatacaaattaagctgaatttgcttccaataccgtattttcaacagttcttagagtagttggatttggttaacatcgactgactataatataagttgactagtactgtatgtttgggtccgcaaacaaataaaccacactttcctaatttaattcatatatatctactttaaaaagtacattcagcatcgttaagagtttttattcccaagaaaatgatttaactgcatgactctgaatatagggttgttcatgaaatctgcaatcgcgcatactcgcaattggactttaatctatcaattgacaattcaagtgataaaatttacgactgaactcttataaacccgaattcaagcattctagtaagctaataagtcaacattaattataaacaattattctaaattcaacgaaaagtaaactttcacgaacagggtttacattttacgaaaaatatgtgtattctttctaactttcccttattcaaaaactgcaaaaggttatctcttagtttcctattcttgatgtacgtttaactcgtagtgttataaaatacttgaaagctaaatgtgcgtggtacaataagatgatcagtagaaaaatatgctgtttttttttttttaaaataaatataataaatgttcttgttccattgcttgcatctgtatgttttctaaccatgtttatgtgcgtaaacaatagaaagaaaaggataaagaaagaaatttcacaaaaatatatagcataaattttttttaaaaaaaagaaaggaatatctgctgcttttcacaaattgttctagctgcgcgtatttaatggtaatcaaattttgtttcacactgaatactgatttcatctactaccaacatataccattacactgtatgtttcatgattgtcaatatatgaacggactattttaagacaaaaaatcgaaacgaccataaaaatttgataaaaaattgaaaggaagctaggcgttttgtgcgtgtttgtttaaatttgcattggtcaattaacgcgtcaattagtaatcaaaatagtagaaatacaaaaaaaggaataaacggtatggagaaagagagacaagatggattatctgacaagcataaattcattcttcaatatataatgtgtcgcacagctggtgttgataatgaacaagttcgtgaacttgttcaagagcagtatggagaaacggcaactgtagaagatgtaataaatgaattgaacaattctttgcacaatttcgattttaagataaaacgagtacaggatcaactggatggaagattaacgctgcactttcagaatttatctggagacccagtatcccaaatggctactccttaccctcctgttcagatagaacttatgagaaagataatcgaatggatcatgaagtgtgatgattaccaatattcattaacgactctgcaaatccaaaaattatcgagaaaagaaatgggattggcacctagtgttattgagtctcacttacatacgtttgaacgtgatggatggctaagacagagagagggtatttggacatttacgaatcatgcgttagctgaattggatgcttatttacacaacgaatacgagagcaatttatacgaatgcaacgcttgtcgcgaaattgtaattgctgtaagatacatatcacaaatgcaaacttactaactgaataccttatagggatatgtatgtgattgtggctactgcttgcatgtttactgttgcaagcatttagctcatgttaattgtataaattgtaacacgccatgggcaaatgcgaccgttataggacgctggtaattttttcactacctactggtgttcgctttacttgtttatacatttgggctacttgggaaaggatatagaaaacttataaaattaacagtttttaatgttggaaaaaagggttcgtaattaaactatgtggagaacactcgcattttaaactgaaatcgttaaaattcaggtgaagggttagactcataaaacacgaactcaaaatcttctttacaaaaaaataaaagagaaatgacatcgatcatcaaacgcataatcactgtcattttctttaaaaatgtccgcatttacatcacatttaaatctgagtgcaatcgtccttaaaattagagctgttaaaaaagccatcttgtaccagtttatcgtaatttgctgcaagaacaataacaaaagatgtttttgcgtccaacagctttttttttagtatgcttaataggcagtggctgacgaagaaaaaattacccattaattaatttattccttgatgatagccaacaactcgtgatcacggtacaacgaatactcctcttcgcccaccttgatgttgcttccaccataagcaggcagcaagacacgatcaccaacggctacgctgggttgagccagtttaccttccttgttataaccgccctttccgacggaaataacacgaccttcggataacttttcaacgctcttctcaggtagaaagataccagaagcggttttggtgtcggccttgatacgttgaaccagaatacgatccaaaagaggcacgattgacttggcggatttcagtttggtagccatgtgaaagaatgcaaaatgattttaaaaaaaagcctaacaaatacaaaaactgtggttaatgccaatatatttccgtcaaaacttgttcgttttgggcaagtgctcagtagcttcagttgaagctgtgatcctccttattaatcttttgcagatcatctggaaagttctaccaaaagtttattttgcgttaatactcaaggttccggtaaaacacaatgcgagattcggctccaatatgctatattttaataatgttaactacgcagtttggtatctgttttaacgacacgcagaactgcggtgagttttccttgtgatttaatatatagtgtagtatagctgacattgccctccccaagattttctatgtaaatctgaggataagtcatatgttctcaaatatttagattattgtttttaatataatcattgacaattgctttgtccgcttgtagcgctgtagctaatgtagtccatcctgacataatagtactcggatttagattcgaaatgtacttaacgtttaaatagagtacttgttctctatttttatgttctaggatatggagaattgttcctatgtcggattcatcaatggtagcgtaattgagttctgaattatgtcgatacttttctaggtgagaaacatgaaaagtagatggaaacatgtgcttgattgaatctggaagatccaattcatagttgtttgggcccgacttctgttacacatagaacggtcctgcaaaactgacacgtatcatacatgtgatgcaaatcacagtaagtgtagttatgtcgtgaattactaacatttactttacaattaaaagatagagtatataaaaatggtattgctgtcaaataatttagttggaaagccttcattcaagttggatatttgtcgataacgatggtttccgtaccaccgtaagaaatttctggttttctacgcactgaacgcagttaaggtaatttttgctcaaaaaagtaaactgatgcaaaaatggttgagattttgtggaggttaagcgacaatttgattatcgcatacttaaaaaggtgaaggtcgaaaattgaagaattcgaaataaagctatcagttattgacatactctaattcccccgtattgatgatactggttcaaggagaaaagtctagctgaaatatgctaatctaaaactcatgtgatttggcttcataaagcatcatcattaagataactaagtcatagtttgctacgccataacacatcaacgagcatgtctcaatgaaagggtgtacagtcaaggtgattgtgataaaataccagaagcaatcaaagtgcgtctttggtgttttgaatgagagaagttagttttcaaagaactgaaattacatttatttatttaatttttgaaaaagtggaattttctgtttttgagagttacgacggaaagcatagaaagagtactcttttttttatatttgtttatatcaacaaaatctgattgaattttcatattgaaatgtgttatcatttctttgaatgtgcttttcacaaccagagtcagccggtcaatcttgcaactttgtattaactatactgataaaaattagtttaccatgattaaatttcgattcttcattctaaacatacacgctgcttcatctttatcgtcgcatgctgtgtttgcgcatttgttattgataaaaccctgtctgcaatcatgactcaaggtccctttagtctactatttgtaaagaaacccccggaatcactcatttgcattttacaacattttttggtttccgtttttagttagatacggacaacctgttcgcttcttacagcacagttcattggacttcttctaattgcaaattcataccatcttcaaccgaaaagtagaaagacttttctagtttcctccgattatttacccttactcgccgataattctacattttctttatcattttgctggatagcatctcaaataccgaagctccgtttactcctttgaagtaacttgtttgcttaatctgaccacgttgtacagtagataaaatgcgacaagggttgtggagtatctagcgatcgggtaaaatatataggcgggcaaaggttctggataactaagttcattgaaaagttggccgttatccataatacgtttggtacttgattatcatttgaatggcaaagatgcgtcaagcttatagatactgagtatgagaaaagcactatttaaagagataggttcctaacccgtaggaagtatatctgaaattgtgctttgttaattcaacaatttttgatattggtttgacttttgtcagtattccttggcctctttgactaaaatccattgcttgcaacgttgcatgtgctattggtttatatatacttcatcatccatacattcaactgagcattttaatttactttcattcaatccaacagtttcctattcacaatgacgatcgattggagacaaattgctgccaaatactgtgcccatcgagatggtagtattcctgaacctttcaaaattaaaacactacctaaggataccgttttgaatgttaccaaaattccaagtgagtgtggtctccttacaccgaaggagatcgaactcactgaaaaatatgatgcgacagcattggccgaaatgattaaggatagaaaagtcacgagtgtggagttagtcactgcattttgtaagcgtgcagccattgctcaacaacttgtcaattgtgtgaatgaactcttctacgaggaagctttagctagggccgctgagcttgacgagtactatgcaaagacgggatctttggtcggcccccttcatggagtgccagtttcggtgaaagagcatatttctatcaaaaatcacactgctacagctagttttctagcgaaagccaacattattgctgagaaagatagtgatctagttgccaccgttcgcaaagctggtgctgttttctattgcagaaccccccagcctcaagctatcatgcatttggaaacatctagtaaccttacgggtgtaaccgtcaaccctttcaatcgaaagctcacaccaggtggttcctctggcggagaaggtgctttgttaggcattaaggcgtcggtgcttggcataggtagtgatattggagggtcgattaggtctcctgccgctaacaatgggctttttggccttcgccctagtaccttgagattatcacgcaagggttgccaaggcgctgttagtggtcaagagaccattctcggcgtagtgggtccacttggtcgcagcgttcgtgacatgaatctctttatgaaagcttgtatcgatagccaaccttggcttgatgatgcatcgttgttaccaatgccctggcgttcagttgcccctcctaaaacgctcaaagttggtataatgcgtagtgacaatgttgtgaatcctcaaccgcctgttgctcgagccatgcaaatggctattgatcaactttctaaaaatcccgattttgatttagtagatgtagaacctttggatcacaaatattcatgggatcttattagcgaaatgtactggcttgatggcggaaaggtttattacgatttgtttaacaaggtgggagaaccaattttgcctttaactgaatggattatgcatcaacccaatgttaaacctcatgacattacggccgtatggaaattgactgctgctagagatgaatatcgcaatcgttatttgaagcaccttcaagcatatggagttgacgttttactgactccagtgggacctagccctgctcctaaattaggggaggcaaaatattggacatacacatctgtttggaacttgcttgatttgcctgccgtagtatttcctgtgaccactgttgatcctaagctcgatgttaaagatgagtcatacataccgatgaatgaacaagacgcagcaaattatgaaacatattcccctgaagactatttggatgctcccgtaagtttgcaacttgttggcaaacgttggcaagatgaagaattactggctgcccttgataaaattgtcagcatgctctagtagggttattggcttttatattttttggagtttaatgataatggatatgttcgttttattttttttttatatacaaacttttctatctttactgttcaatagaaatgcggttttttatcaaattgttagatggactttgattaaaaaaagatgataggagtaagaactaccgtacatattttgttgtatgaagaaaactgtacaagtaaaaaacatgctatgttatgacttgaacagtttcctgtcagctttctggactagcttattaaaattcgcacaatgatttctttacagatttctgcataaaagtatgaaaataactatacaagttcctcaagaaaaagataaaataatctttgaaattaaatttcacaaaaaaaaatactaaatgaaatttgctatatactgcacctttgtttgggttgattgatttttccaacaacgcataccaagtgttttttgaatttctcataccgtttggaaattttatatagataagttagcttagtaaggtaacctttaggaaactcaaattagagcagccatacttttgtttaccagcatcgatcaattttcaaacatctctacaaacaacaatgtagcacgtgtcttgattcatatacttaaagagctttactgtgttttctcaaatgagtaccaataaatcctatcgcagccatatacggctttacggtattctcctttaatttctcaatcgttgattagagttgcgcgccctaatgcgtattcccagcgtacaaacaaagcgcttctccatggacaactatcgcaagctatggccgaatatatgcccgtcggccaagatagcacgggttaagtggtaggcgaaaaactttggctaccattgcttaagggaatcttcattgaactacggcaatgaacttagctcgccgaaagatcatgccaaatttcttgtaatttactggtatatatatgatgaaaatctcgcttctaattgcttcaaagcaaacgtgaacaatcacagcttcttaaacgacagtagaagattatcgcgaattaccaattgctctttctagtttgccaaattgtgctggaatcactcatcgatacatttttgttttatttagaacagacttgtatttatattttgcgttagtgctgtctaagtacattactctttaagtactgcttcttactttatcttaagtctaaatcatggccgctaaacgagttgaagctaaggattacaaaaaagctgctgctactttagtagatgccttcttcgatgaccctgtctgcgtctacctttgtcatactacgaatgaacagcaatttaaaaaattgatgacggagatgtttgagtatattgtatatgcgcacattattcgcggccttgttctggaagtcggcgattttgctggaatttctttatggatgggacctgggaataacatggatgattggtattccattcttcgtagtggtttatggcgccttaagtataaactagacggagagggtcgtaagcgtttcttcaatgaatttcttcctattctcaatgacacgaaagccgacgttttgaaagagcgtgatgaccattcttggtatttggtctatgttggtgtcagcagcaaagagcagggaaagggctatttgcgaaagcttattgagcctatctttaacatctgcgatcaggaaggtctccctatctatttagagtcgagccatcttcataatcgtccaatttacgaacattttggatttgtttaccaacaaagtatctacttaactcgtgacaaccaaaaggttcctcttgagattatgattcgtgaacctgagaccgaatccaaggctgaacaaagtgcgaagcctaaagctgctcttagtaaaaccgtatctgcttcgattgctgagaaagtagagggttctctcgctgtatcatctactcctgtttgctgagcgaatctcctattattcgattttgcataaccctattaactcttaatcttaatttcattttcttatttccagcctagattcgaaattccttatccattcaatctctaaacactttatttaaagcagacaaatttggttttgctattttttatctacaatctgcataaacacaatttcttttcgtattttgaaaaatgagcatacagactcgcttaaaatcataaactaagacaaattacttaagtgtttctatgaaataaaataataatctacacagaacaatcgttacacaagttcttaatatgagtttattgtaaactgagtagaatagtattttcatttgcctccaaatgaccatggcaaattcgaattattgacacttattagctagttccaatccatttggttttcaaaatttttatatgattttaataattggtttgatgtaattattcataaatagcccattctgagattttagttgtatacctcacgcaaacatctattcttcatataccaacacttaagaacctgtaaattgaccagtgcattgtattagggcaatcaactcatttttcatttatacaacaatctaaaatttgaatttaccttttcatcatacacattaacgtataatttatgctcatgctcgtataaaccgttcaggactgtttccgaaagtttacttgagagattgtagcctttgcttataaaatcaaggcctatctaattcaatttgatatgaaaaaatcgcttttatttgaaagaattaatgaattttaaataagattgtctttgcaaaatgattcgcgcacatttgttctccgaaccagacaactccaagctatgggcaaagtccactggatccgatgcctttgatttaattctgaaggtactgctttggactgctccttggtattattgcctaactactcttttttttacttggttgatcattttgtatcctcgaccaactcttgcatgttctgttgcagcttggctgttttggtttacttctctggacaccttggaaccggatgatagaaaaaatacacttaaagcatctgaagcagtaagcacgagtgctaagacgagtgaagagactgctaaaccatctgaaactcgagaagatggtgagtggaatacgctaaaaaatactttagaggccgatgctcagaaccttatgagtggatttcaaatgctacaaagacgttggtcacaaccgaaaactacgacactcaagacggaggtaaaagaacaacaagcttcacagtcaccgtctgtagaaggcgagaatgaaccagctggagtaaaaagtaatgaagctactaagccatctgtaacagaagaaaaagaaaagaacgccgagcaaaataagcgtcgtgaaagattatctatctcgcacatcgtaactgaactggccaagaaagatgaagtatcaagtgaatcaggatcaaacgagatcgtgaatgctaaattaaaaaatgagcaacttgattctaatttcactcttttggatgcgtatcttgaaccgcttgttcacctgcacgaatactcaagaagatctaacactttattcttcttttatttgccaatagttatgtcaattttgatattttgtctacctacccaagctttatttattgtactatctagcgtgtttttggcatggcattcacccccgctacaggctgttttattttgcattcggagaatttcattttttaatcttttgtatgaaaaatttgtaatcggaaagacgaaggaacctgcaaaaccagttccccaaccctcttccaacgaaccccctgcgccttctgcagaaaataaacagccatctgtttcttcacccgaaaagaaggagagtcctgccacccatttactaaaggttattggaagtagtccttatgtggttcatagtaatcataccaacaatacattaactgacaaagagtcttctgatcccactgaaaaatgcttatatttaattgaacaccaacggtattgggttggcgtaggctggctgaaccgcacattaccaaccgatcctccaaacttcacaaatgctggatccactgatcctgttgcagagcccactgcacaactgctgcctcccgacggtcttgcatggattgatgataaatggtcaattagcccatggacttttacagacacattttgggcccagcctgcgaaaacacaatttcgaactgcttttacaagatcaagagaatggcgcagacgctatcgtgtagctcctcccgcggaaaatgaaaaaccgcacaccagccgaactaatactgcttcatctctttccagcacatctgaagatcaagtcagtacccatggatctatctcttcagccaaggtgactgctataccagattctaatggtgctgaagcactttaaattgtacatgaatattaaaagttattacgaagtgacccaaatgggcttttgagagtactgaaataatgacacacatgcaagcaaaaaatttagttttaatattgtttatctaagttgtaattcaattgatttttttataaatctgtttcttcctgtaagcccggatataagctcgggaacgatttgcatattacattatcttagtgaatggcttcaaagtcaatcatatttttctaatactagaaacctcataagcttctccttctctttcaattatgggttcattccattccttaataccctaatatcttgctcactttgccatagatactgttggccgaaaatcgctgccaggcatcgacaccatagatgggcgatagatgtttagctatttctacaaatcgcaatttatcaccaaatgacacagtattaaagtaaaaaaagagaaagagaggatacctacattctcgtatcaattctaatgactttcgtccgcatttgagtccatgaacatttgtgctgcacagctggccgatcttccaagacagccgtttagatagctaaatttggttagccgagagataatcattaaggacgatttaagattatttatctttttcgcaaattggaaaagtggttataatgttcacttcccttcacaatgaagagatcttggttgtttcaaaagtatataagtatctggtgatttgtaaacttgaagcttgtttaccgttaaattagtttctaattcctactgtcactttacattaattttctgttatactatcgttttcttcttcatttatcaatttgcattcggacaaatattgattcgtctaaacactatataattttttaatcatgactatagatttaaatgttatacaaagtgacattatctcagcgcgtcgagctcctgaaaatagtctgtttatagatgggaaattcgtttctcctatcgagccagctgcgaagcccatccctttaatcaatccagcaactgaggagattattggcacttgtgcaaatgcttctgccaaagatgtcgattcagctgtggagaatgcttacaacacttttcgttctggaatatgggccaaatggcctggcaaacaacgtgggttggttttgagaaagatagctaaaatgatgagagaaaagcgtgaacttcttgctggaatagatactattaactgtggaaagccaaccccatacgcattgttcgatatagatagctgcgcagacatgtttgagtattatgctgaagtggcagaaaccgacaaccctacagttaaggttcccttacctaacaatccaggattttgcgcatttgaaaaacgttttcctagaggtgtcatcggtgtcattactccatggaatttccctctgaaaatggctttatggaagctggttccagctattgcaagcggtaattgcgtagttttaaaaccttcagagttagccccatggtcatgccttgaattcgcactgatttgcaaggaagcgggtttgcccgatggtgttttgaatgttatcattggatctggtaaagagtcgggagctgcacttagctgtcatcctaagattgcctatctagcatttacaggatccttggctaccggaaaaaagattatgcatgctgctgctgaaaatattgtcccgttaacccttgaacttgggggtaagtcacctctaataatttgtgaagatgcggatctttctctcgctattccttctgcagcctttgctattttctttaatcaaggtgaagcctgtactgcggcttctcgtttgatcgttcatgaaagtgttgcggatgaagtacttggcggcttagtgagtgaagctaataaactaataattggaaatggattggatcctcaagtaaccttgggccctgtagtgagcaaaacccagtttgaaaaaattgttagctacattcaatcagctataaatgaaggatgtaaatgtgtagtaggtggacttcccagatctgaacaaaaaggttattttattccacccaccgtatttacgaatgtgcaaactcacaacaagatttggagagaggaaatctttgggcctgtcttagctgtgaagacattccatacaaatgaggaagcattggagttggctaatgactctgaatatggacttggttccggtgttttttctacaaatcctaaaacccttgaatttttcagcaataacattgaggcaggtatgtgctcattaaataactatcatgttgttacacacgagcttccatggattggatggaagcactctggattaggtgttggcttatctaagcacggctacaatgagtacatgcgtctcaaacaaatcactcagtatgttggctaaaactactgtgacactttgtttaaaataaagatgataaatcatgtactatgcttgacgataacgacaatcatatacctccttttcacaaatatatagtttatttacattcaaattgttttttagttgtagtcattggatagggatcaaacacttcttaaccttacagtaatttattcaattaatttgagcgaatttaaataaactatcatatctaaaacaagagagtaaaaaaaaattcgatgcatctaccagggatcgaacctgggaccgtctgcgtgtaaagcagaaatcataaccactagactacagatgctatgtgcattaaaattaaaatagttctatgtataactaattttttttagttagagaacagcttaaatttataaatttgttgcatattggtgtgaagctacgagaagaaagtgtgaaggatttcgaaaaccgattatttaaaaatattatcgcatgaacatactccttttccatggagagcatatgaaatgtcaagaaatttggtcaaggatactcagttggtaatgagcaaaacaagcagaaaattaggcaattggtattaattacttttatttcttcattgacattttcgttactcacttattgatgtgtaaaaaatcctatattctgtcagcaaaagtacactacgctatgttacagtatgttgcgtatcactatatgtcatatatggaatactagtcaagatccgcttattgatcatcacgggtaactatccgtctatattcatagatacccgttgataacaattacttagaaatattataaatagagttccaactgaacctcgttcctcagttcagttatgagctatattagtggtaggtaacattataacctagttaatacaatacctatactcagttgctacttatatcacatgtgtattgcaatataatagatcacaaggaaaactcaccgcagttctacgtatccttaaatcagataccaaactgcgtagctaaaatattctgcactctaagagagtgcgttatgatttttaccatattattttatagcacactcagtttccttgaaagtattcctcagtatgtagaagttttttgtgtaaccacagcaaactaaaagttttatatttcattttgcgatttcggacagatgcaaaatgtctttggttgagcatttcgatgcgactttgagcgctgatcccaacactcgcactaaggccgaactttcactaaaacagttagaaaaagagcccagttttgttttggcggttttacaacttttaagtagtcaagaaatttctttgcctactcaacaggcaggtaagtgtgaattgtttgagaaataggaattaccttgaaaccgtatctagaatttttgctgtttgcataattcttagttagagctcttttgaatacgtgatgaaaggttataatgttatcgtactgtatctcaaaattttttttattttgtattagcacaaaaaaaagctattaatttcatttttaattaattatccttctgttttcttaggcattctcatctttttatttatttatttatttttttttttggttgagaacctgatttgtttactcaattcctatttaattcattatcatgtcttgaagatgttatagctaacattattgaatttagccgttatttatttaaaaaatcgggtatctcgttcttggtctagtatcgatgatgctccatcacctttggatattccggaagagcaaaaagctttgttcaggcaaaacattcttccggtgctcttgcaaagcccaatgtcgacaaggtctcatttgatggcgatccttaatatcatcttgtcaaccgatttccccgaatattggcccggattcagcgaatacacttctaacctcgttcactcaaccgaacgttgtgaggtgtatgctggtcttatttgttttcatgagttggctaaagtataccgctggcgtttggatgaccgtcaacgtgacattggtccgttagtcgcagcacttttccccactattcttcaacttggtcagggtcttatcaatcttgaagacaatgattcagccgaaatgcttcgtcttattttaaagacatttaaatctgtcattgcccttgagcttcctccggagttacttgctaacgatatgattctttcctggatccagcttttattagcagtggtgcaaaaacctctccccgaatctttgatgtcgcttgaaccagaggtccgtcaatctcatgtttggcataaatgtaaaaaatgggcgtattattctttgaatagaatattcactagatatggagagcctagctctttggtgggtgattctgcaaacaaataccgtgcttttgcaaagaacttcattacaaatgttgttcccaacattctggagacatacattcaacaaactattctttggactcaaggtcagctctggttatctccccgtgttttgtattttttgggatgcttctatgaagagtgtgtgaagccaaagtccacttgggcactcctcaagcctcatcttcaactattgattggcagctttgtgtttcctcaattatgtatgagcgaagaagatgaagaactttgggaacttgatccagtagagtttattcacaaatatattgatatctatgatgatttcaattctgctgatgttgctgcttcacggttccttgtgaaattagcatcgaaacgcaagaaatatacgttcatgggtattctttccttcgccagtgacatcctgaaccaatacgccgcttcacctcctaatgaaaaaaatcctcgccagaaagaaggtgcacttcgtatggttgctgctgtatctaattccatcctttctaagaactcccctgttgcaggcatgatgcaagatttccttgtcgctcacgttatgcccgaatttactagcccagttggttatttacgatctcgagcttgtgaaatgatcaatcggttttcagaaattgattggagtgataaatcgcagcttttgaatgcataccaggcagttttgaattgtcttcaagataacgatttacctgtgagaattcaagctgctttagctttgcaaccacttatgcgtcatctggaggtacacgatgttatgaccgcccatgtacccatcattatgcaaaatctcctatttctggcgaatgaagttgatattgatgctttatcttcttgtatggaggaatttgtaagttcttttagtcacgagttaacaccttttgcttcacaattggctaaacaacttcgcaataccttcgtcaagcttatgcaagaaaccatggacgaatctactaccgtagatgattttgactccttagttgatgataaatcgattgcggctattggcattttaaatactctcagtacaatgattttaagtctcgagaacacggttgatgtcttacgtgaaattgaagcaatcttacttccaatgattaattttgtattagataacaacatttttgacgtgtatgcagagttgtttgaaattatcgatggttgcacttttgcttctaaggagatatcccctattatgtggggcgtgtatgaaaagcttcaaaaggtgttgaaagagtctggcattgagtttgtagaggaggcaactcctgccttaagtaactttatcacgtatggtggaaaggaatttgcttcccgtcctgattatatcgccgttatggttgatattatcatgcaagtttttaatagcgagcacctggccgtcaatgaccgtgtttcggcttgtaaactaaccgaacttttaatgcttaattatcgtggccttttggatcaatatgtgcctgcgtttattgaggttgctggtaatctcttacttgtaactgaaaagccaacttctcaaacataccgcgtatttttgttggaggttataatcaatgcattatattataacccatcgatgtctcttggggtacttgaaatgcatcagtggactttaccattctttgcgttatggtttgaaaatataccttcgtttactcgtgtgcatgataaaaagttgagtttggtagctattttatcggtaatttcactgggagctcaacaagttgctgttgctatccaagactcttggggtaatataatgaaagtcatgataactcttttaaatacactacctgaagcattagctgctcgcgcggaattagaaaaagagtatgacggtgaaacatttaatttatctggctctggttggaatgatggcatcgattgggaagccgatgatgatgagggtgtcgatgactttgccgtcgaatatgggggacctgatttgggtggagaaatctcggctgatgtggttgacgattttgacgaatttgagcatttccaaggaaattacttgttggacgaggatcctcttttccatactttgttagatcaagttgatccattttcacttttccaagagtttatggttcatttaaaggacaacagccctgtcacattacaagatcttgtcaaaaatttggaagcatccgagcagcaatccttacagagattggtaactgaaaaaccctctacccttgctgtcgcttccgataaaacatgagcctgtttggcgctctaagcctgtccaattttggtaataaaatataaaaatataaaacaagcattttctacacagtggtaataagccaaactgacatatttgaacggctctttttaaatgggaaatcaaactctacgggtttgtaaaaataatttcttcaatgagatacgacccggaattatggcttgggaaaaatggatggagggtttgtctaaagggaaggctaagaaaattattgttgtatcggtttacagttcggtgaaaacaaacgcagaggtgtgtttcttttataagaattttggaacgccaattgattaaatgaaatttaaaatcataatataccagttaataaatatgagaagttttaaaatcgattaatactagttcatttgcttttactttatgcgaattgacaaacgcaagttgatgagaaaatgaaatagaaatatatttttcttgaggaaataagcataaagttaagtatccacgatttagtagtatagggaaagtcggtgtttatgaatggtatattagatgtacgttgaattaagcagctaactaaattgataacggctagtttaggggttggataatatgataaacggcttttacaaactaaatttgatagacagccccccattaacgatgttgttatattgataaagctaagatttgcaagatttatctttaaagttattttaaaaagatatccttcaaatttatgatattattaaaaatatcataaatatctttaagagccagcgttattatactattgcttcaaactgtaatgatattgttgttatagcacaacgctatcatataacagcattccaaagccgtaacaacagtacatttaatcgcggtttttgggtgaagttaagacctaagatataggaatacatttttattaataatatgggactaccccctaaaactattgttttagacaatggggcataccatataaaagctggatttgcaggtggaaaagttgtgtaagaagaagtgcatcacgtcaataaatttcatgtatcttttacttttttcagctaacgatagtttttagtgaaattccgaattgtttgacgagatcaaaagatggaaacagattatttttggggaatgaattggccaactgtaacgactttacaactttacaatttcgcagggcgcatgaaaaggtacagcatttatgagggagtattatttacgaacaaaataaatacaaagattatgtttactaatactagtaggggtatttggtccattggagcacagaaacagccgtatgggacttggtaatgcgcaatgtaggtgtgatggaacctagcatggcagactattctttactgcttacacagcccgtatttacaatgccttccatagaacacaatactatacaactcgtgtttgaggaattccaattcgatgcttacctcccttgcaccccagctgagctaattccttgggatcatggaagtttcacaatgaatcaagaagatgcgtatactggtcaacatggagaatgcgttttggtaattgactctggatatagctttacacacataattcctgtgattgatttctctgttcaagaacaagcggtaaagcgagttgatgtgggagggaaattacttacgaattatttaaaagaagtcatctcataccggaagtacaatatgatggaagaaacatacattgttaatgaaattaaagagtccgtttgttatgtgtctcaaaacttcaaggaggacatggagatatgtcacgaaaaaccacggtcaaaattggaaatttgttatgctttgcccgattacagcactggaaaacatggatatattgttagagatattaatcaaaaaatagagcaacaagttttgaatctttcaaatgagagattcatgataccagaattattattttccccatctgatatcgaaatacgtgaggctgggattccagaggcggtcatgcaaagtgtcacccactttcctgaaaatatacaggcaatgttgcttgaaaatgttgttacaataggaggaaactgtaaatttcccggatttcataaaagactatcatctgaattacggtcgctggcaccagctaattgggaagttaaagtttttgaaccttcagatcctatttgctttccatggaaaaaggcatctcatatgccgttggagcactggaatgcgaataaaataactcgttctgagtactcagaacatggagcaaacataatgacacgaaaaaggagaatataatagatcaccattttaaaactcaataatgtgggttaaatttctatcttcacaaaattctcaaggcgagctgataattcgcatcttaagaaattggtttattacattaaggctacagcaatataaaacgaaaaatatgcatgcattaagaataaaatctttttatattaattaacgaatcattctatctcttgatcaaccactaaaacaacagctaaataactatatctttattattgtcgccaggataattcatacctaaaaagcgttagcgaaatgaaagatattataaaaaagataggaatgaaaatcagtatacaagtataaaaatttaaccacatagttgtgtcttcaagactaatcgatttgtaaagcatcatatgtaacattctatctcttcaagtgtttatacttacatattattaatgtgcctgaaaaacaagattgaaaaaaaagaaaaatttcagcacttcttcactactgtttcaagtgcattttatatgtacagtgcagtttcaggttgacagtataagagttaaagcaaccttgagttagagcagtcacggtatactactttaattagaatgtagcgcgttgcgttgcaatgtagtcgtgtcgcgtctgtttacattttggatagaaagagcttttcgtgaaattttgttgcttctgttggataaattgttctttttctcaagttaatcatataattcagtaaaggaaaactgtgtaataagaagaatcgagatcccaaattatttctgttgagccttgttcatgggctacatatattttccctcacattttcaacagtaaagccttaaatataaaagtaaaagttgattaaatgatataaatttactttaataatataaatatgtacagatattttatattttcttcatagatgttacccaattgaatcgttactttaagctgtaaaagttggccaaattgcagtaatctcgagttgaccaccaccaaacactaatattgtcttttgcgaaagtaaacaaagagaattaatcccaagctaggctctcattaagaggaaaaatcaaatacactaatttagtaaggtggctgtaccacatgaacctaggaagatgtcctctagctcctcgatctgcgaatatagtactcccgaaacatgatgccgtatccaaacaaaaggaatatcgaattgaggaaaagacaaacgaagcacaaagggaggaaattataacttggaaagacaacagggaagatgaaggagaagtgaaaaccgattttgaggttgttaataacgaaaatattatcacaaccacccctaaacatcaaactgttattacccctaaatcatatcgcaagtccgtaaaacggattaaacatgatgctcctcaaaatgaggatattcctgtcatgaaggggctggcccccattaatgctgatactgagtcgaaggcggaatccatggcagctgggaaagttttgggatctaagaattcctctcaaaaggctcggttacaggaatggaaaagacagtacaagaaggcatttcctcatttccgtttttatttggatggatgcgacccaagtgttgctcatcgagtgaaaaaacaaattcagcaattgggtggacatgttgagacgttcttctcaggaaatgttactcatgttgcaacagttcgggctatccaagatgtttcggttaagtatgctaaacaggatgtaatcactaaggctaggcaactgaacatgaagatttggtctatggaaaagctttgcaaccgcgtgttaaaaactttaatggagaatgatcaatgcacaaccaacgcacccaccaaacaggggaatgacttgagttatttgctttacgtagaaaaggtgcaaggaacgaacgaacgcgatttatctgttcctagacaggactttgtgcattttcgtggaccctacctttacgtgcatgacatagctaacatttacaaacctatactcttacgtgaatggcaaaaaccgcttcccgacagggacgttccttggccgacctttcgtgctactagtattggccggtgtccatttgtacctgaaacaaagtatcgtctcagtacttccaagtccttggttgctaaaaatgaccagcaattattgcaacgacagagtcaagaaccatcgctgattcttcgtgcgaattcgatgaaagcttccttgcctgatatatccaacaccgggatctctggaatgaacacaaataccacttataacaccaatatcaacaacacccctcaaactgccatttctggaattacccaagatacatccccttctataaggacaaattgtcatcactgtttggatgacggtatgcaagcatcgggtatagtacagtcaaacttgacttctgctgcaatgtccaataattctgctattcgctccggtagtgctgctagtgttccggtggtaacaattaatgggagagatatcgcagagttgaaaaagcgtattattcagcaaaagtctggcatgattggcaaggactactcttataaagcgatgcttcacaacacgagtcaacggaaaattcgtgtagatgcgaaacctggctattgtgaaaattgtcgggagaaatttgataattttgaatctcatatccgcagcagtaggcatcgaaggtttgccgagaataacgataattttaaagaccttgatgaactgtttgcccttgttcaacgtcccttaaggccagattgagaaaatagcccgtgtcttcaaattttggcacattcacttttcactaatatacgatcgtgcatgcgtattgtgtacacctccttatgcagtttctcgggatttaattacatctatgtatgtgctatttacctttctttttttatcttcctcttcattttacatgtatacttctaatagttgttatatcaaaaagtttcacggtttattttctgatttaccagtatcccaagttatctattgaacaaagtgttattcattaatagtttattggggaagttagtcatcgttgcttatgaattactacctggctgagcaaaatgattcttgcttaataaaggacattttataacgttttagattttttagaaccggttacttgtctgacaactcgtctactttcactcttaatagcgagaaaaaaatcttatcaattgtatatttaaataacatatcataaatgaattacaatcagttaatttaaatttgctttttaatcgattaattaacaaattcaggcgtacgtgcaaggatacgtctgagattttttttttttaaatttcggattactcataatatatcatgagttctcatttatttttctgactgtagaaataaatagcattttttattttatagacatattttcttaattgctgaaagtataaaatcagcgttttactgtacccggctctccgccctgtatatgcgtttaaagcgtgttaacgatgtgtgctagttttcgtcgtctgcgcgtgcgaaatcacaggtaatcttaccataaattaacctgccctaaacagacaccagtagtcaacgctacttcgctttctttgtttgcgatttactctattttgttactgtagcgtcaactttttacgcaggctatttactgtacttagtagtaacctaaacactttaaatttggtgaacgaacgacgttgtataaaaaagtaaataaaacgaggttgagttaagcggggaagaacgtttggaagcttatatatttttgttttctcacgtaaaaatctttattgtatacactttcgggaccttgcctaatggaacatctctctaatcttgagcaaccaacaacgatggactcatatgattttcagaaactgactaacgatgaaaacttgcaaggaactgaatctcaggttccttctggtagcaaaagtgccagcacaaatggactattaagcgctgcttcatctgctgctggttcctcgtttggattgactccttctgctatattacagcaaaagcatgaaaatgctcagcaaggaaagaagcaaaacaattcgaaatcattttccaaaaaacctgccattgacgtccattctgaggatgcatttcctacacttctttctaaaactggtcccagcaagccaaggattgtttcgtgggtcagaaagacagcttccaatactagcgttgctggttctgattcagtttccagagacaagattccgttctctgctagctctcgtgcatcttctacaaaatcaactctttcttcggtaaaagaaactgattttgttacggaaactttgattttaagccctgataatcaagctcctcgtatgtctttcgtgggaaagcctaattctgttgctgaaattgttcgtactgtcatgcatcagacctctacacgtattaatgtttctactgcatcaaaaactaagaataccacgtttttaattcaaggaaagacttctgctgtcaaagcggctagacgccaaattttgaaattgattggtcgtcgtgaaacgaaaactatgccctgtcctgtttttgttgttggggctataattggtactaatggacaaaacttaaagtctattatggatcgcacttcaacacgcattcaaattcccaagcgtaacaacaccgcaaacgagtcctctgatgatgccaagaaacctgaaaaggaggaaaattcagctgcttctaccctcgacgatttggaaccccaatatgaaatgactacgattactattgagggcgatttcgaaggtgttgaacttgcccaaaaggatattgaagctatcatcaacgaaagaaccagtaacactactgttcgtatcagtcacatttctactgagttatacagtcttcttaggggcccagacggtaaaaatattaaagagcttgaagagggtagggatttgaaggttcaaattccttttgcatatttagatccttctgcccctgtcaatcccattgttttgtctggtgaaaaatcagctgtacgcgaatgtgctttgtatcttcaaggtcaagctgaggaacttcttcgtactaccatccccacaatgctacctattcctcgtcgtcaacaccgtttcattaacggagagaagggggttggtatccaggatattttgagaaaatccggatgttccgtcattttgcctcctattaatggcgattctgatgtcgttagtgtccgtggccctgccttaaacatcagtgaaggtatccgtttaactcttgaacgtgcaaactctactattgttgacgctgtaaatatcacaacagcatatgcatcctctaaaaacccctttgatattgctagcatagtagctcgtttgttccttcgttcgaggaaattgattccattagaagaagaatgtgccgtacaatatcacttaccaaagcgtgaggagcttcagtcaaattccaataaaacagtcataattgagatttctggtaaatcacaggaagctgtccgtgagggacgtgctaaacttctcgcccttgttaatcaatttccggagagcaagttttacaaggtaacaattgatccgcttcttcaaagatatgttattggttccaagggtaagaatctccagaagctcagaaatgagcatcaggtagagcttttggtgggagaatacggtgaagaagatcctgatgtcattgtctgttatattggagctgatgatggaaagtcgcctgaccaaattcagaaagaactcgctgatttggccgagtcagttaagtcatcagctgaagcatctgctaaaattgtgtctgaaataatccaggttccctccgtgtaccacaagcatattgttggtcccaaaggcactacgctgaacgctataattggtaaatctgaagaaaatgtaatcgtccaacttggtaaagtgtcgtatcgtccggattctacggacgatgatgtctatatccgtggtttttccaaagatgtcgaacgcgttgttagtgaaattaaacaagttgttcgtgatgccaagaaccacgaaatccttcattctcatgtcgaagagttcgatttccctgctcaatactctaagaacgttattggcaagaacggtagtaatgtttcttctctgcgtgaagaccttggtgtacaaatcaacgtagaagagggccatattcgaatccaaggtataaagaaaaacgttgaagaaacagctgcacgtattaagtcccaaattgaagcacttattgatgacactattttacgagttaacattcccaatgactttcaccgtcaattaatcggttctaatgggaaatacgttcgtcgtttggaggaaaaattctcggttcgcgttcgttttccacgtgaagacgattcttccaattctaccggtaatgagctgatgaaaccgacctctcctgacgaagttgttattcgtggtggtaaaaaatctgtagctgcagccaagcaagagctcttggagctttacgagtatgaaaaatcgattgcttatacttcgacgattgacatcccttcaaaggcggtttcacgggtcgttggtcgtaacggttctactgtggaaaacatcagaactcaatttgatgttaaaatagacataggtgacgtttcaactgaagaaactacacccgtatcggtacgtggtgctaaggctgatgtcgaaaatgccattaaagagatttcagccattgcagaggaagtcaagaatcttgtcgagaaagttataaaaattgatcgtgagtatcatcgctacttaattggacccaacggaagcaaactgcaaaataccatcaaagagtgcggtggatcaactgataaaaccgagactgctcgtctgattagtttctccaatggaaattccgaagaggagaggaattctgttgtattgagaggcgacaaggaaatcgttgaagcccttgagacccgattattggagatagttgaagagctgaagaaccaagtcgaagagaagattgaagtcccgcagagatgtataagctcaatcattggaagaatgggctccactcgtcgtgacatcgaaaggaaaacgtctaccatgctcaacatcccgaatgttcttgaccctgaagagactgtcactattacaatcgtcggaagtccggagaattgtgaaaaagccaaggaaatgattcaagagaaggttgccagtcaatatacccagatgattacagttcccgatacggtctatgaaagtataatgaaaggtattttaatgaaaaagcttcgatccgatctcaaagtgtttgttgatacccccgagatcaagcctgtacaacccacggaggttgttcttgaagaccacgaggatggcgttttcccttggaaactggtaactcacgactacactggttcttcttcatctgagtgggctgttcgaggacataaggaaaatgttgaaaaggctatcgcttcattggaaaaatctatcaagcaagttatggaaaattgtattgcttacttgggtatcccaacgaacttgcaccgtcgtataatcggttctggtggctctattattaataagatccgaaagatcgcccaagttaaaattgatgttcctcgtactccaggcgatgaaattgtagtagtccaaggaagtcgagctggcgttgtcaaggctaaagatctgattttcgagagacttcaagaaaaccaaaatcaagagtaaggtaaaattttggagcctttatttagtacttacattcatttctcaaatttttttgagagtgtatttgaaaattatgtgtacgaaatatcattttgtcgctcttttattactacatgtcattttttaaggagacggaaattgcttgaatcgagcattttccttattgattccttctttgctttgttacattgcctttgtttaatattacaaatatagacgcataggaaaaaggcgtacctagtgcatttattcaatcttttcagatataaacattggaatgtatagataattcaagaaactagaatagttgaaatctatgattttttatgagaaaataagcattgtacgacagataggacacaacaagttttagtaaaagaatattataaatttacaaacaacgagctaaaatttaaccatttctcaaaagaagaaccatattaggacgttttttttttccaaatagcgtaaataagttaaaaaaacccagaaaaccccaaaataaagaacaccggaagtaaggagaaatatgagacgaaagaatgtggagtatgaagtatataatgaaagaaacaaaaggcctcgtacaataaatagactattgaagaagcgcatcgcggaaatgcttttttgtgttattcttaatacccatcttgttagcaaattcctctcttcttctttggtcttggaatgatttgatatgagaggcactataattcttacggccatcgcgaacaccagctatacttgtttcaacagcttgtctataagctcgggcattaccactcatcgcacgtctggcgacgttctgatgaatagaagcaccatctcctacagcggtagaactagagtgaagattttggcggaagtagcgagataacgaacgatggcccacacgattaccagagggtaaatgaagttcatattcgtcagcaatgggtacacgacccatttcaagactatctaagctggagttatctgaatcatcagaaacatcttcccagtctccttcaccagagcttccatcttcttctacgacagtttcgtcttgctttactgcatagtcaggatacgatgtagtaaaatcataaaaatcagagagttcaagctgttcatcttctgtatcataggcaatagaggtatgccccttttgctgcatatgggcacgaacagcttctagtgatttaaattcacgattgcaggtaaggcaagtaaagccgatagaaattttctctgctaaataatcgaatagacttggttcatctaccaaatattcccgctcaggaatgtacaagctatgagaagccttcatatgcttcttgcatgtatcaaatgaagaaaaagaggctgcgcaaaacaggcaatctcttggtgaaagacgttgactacttcgacgagcaagttcagcttcaatttcttcaggagttggttcttgtgtaaatagatgagacttggaagcttcgttcgattgaggtatggaagtagccaattcagttttagagggttcactttctcgaccatgaagagataagttggaaagggatatcgcccttgatgtcagttgtgaagctaaatcttcttcttcctcaatttcgctatcaactacaggttcacccattgacaaggttgaagaagcaatactacttgcatcttcactttgaagtttcttaatacggctgtttctttgaaatttgctcaagttatcgcgatgcttcttcgaagccatatgtgatgaataggcgccttctgaataaaactttttattacatacttcacagttttgataaaattctgcttttttctggacttcctcgttctgcttttgaatggacaaaatctttccagcaaacacctcagcactcaacggcggcaagctagcaacctttctcttcagattataatgatgccagtcagacttccaatgtattttctgtgattctgcattattgaaagccacagtacaagtcgtgcaagcaaaagaagtcgacatttcggtattctgtcaagtaattcaattcttagccagtacacttttttatcgaaaaaaaaattgatattgaagccgagtctttcctcaaatatattctttgactcaaactaacttaatgagatgaagtcaacccttttttacaataccttgcacaaaaaggtgttggttgaatccaacttgcctacgatcaactattgcctacataacttgtagcaccaccaaattattttaaagtgtcaaataattatcaattttattgaaatcaaataaaattaattgatatgttaaacatcttaatgtcttgtttttttaaacttaatttatgcatccctcaaaaacattttctattgcttagtaacataaggcgtaccttttgattaaccagtaagtcctaagaaaactcatatatagacaaagggctggaaagaaagaaatggcatgcattgtagttttagcgagcacacgagctcccactcttcagggtttaattaaaattgagtatttgaaattgaggtatttttgagttagtttcgttggaataatcatataggaaatacataatagagtttaatgtcttttccttttgtttaataagtttccttgcctcaataagaaagttagcacatgtgctttcttatctcttttccctcggggtttaattagtgttaaaatttcgttttatgataaatggtcagctgtttcttttaaacctttcactaaatgactcagtgttccaggatctctagcacgattgggataccaatcctcaaacagattattccataattccttctcctcagtatcttcgggtgaaaaaaagtaagaagggtttccagatgatttctctttaaatttcattgaccatgctttaaaagtttcaatttgttccatgatttcttcttcattcatcaatttcaagtcatcgtcactaaaatttatatcccaattatttgcctttgatccaagaaacaatgtaagcatcgtaattgtaatctgcttatagttagcattttactccactaaatgtgattgaaatcaacagtcataaaagatagatagacagcaacattagagacttacgaaaactttgcttaaaaaggagtttccatttttttgcttcgcaaccttagctgcttttaaaaatatatttgtaaaaatacagtttctatctctcatatcagaaagcagaagaagaaataaaactttcaaagaagaataacagacgataggaccgacttcaagactacaaatttcgcataatttttctgacagtttaatgttccaatcattgacgtctcgcagacagaccatttcctttgcaaagcatccaaacttatttaaagctaaaaccaagttttgcgtttcacttgtaaagttagcaatctaataacaaaaagaaaaatccttactcattgccattcaactgattttttttgtttattttttttctttgaatgtatgcattgagttgctcgtgtaaactttctgctaaatcattatatacattgtcaatggcaaataatatatcttcctgtacaactttgttgaccgccaatcggtggaagaatctgctgcacaaaatcatcaggaagttaacggtagttgaattaaatatatccagtatttctttatacaactttgaaaagtccttatgaaattctctcttataaagaagctcgtcaggaatttgctctacgcattttataaaaaagtatgatgaaacacaagattctctgtatttctgtaatagtaatggaaggtttcgtaacattgcttgctgttggtttacgacctcatcttcaagtcttttacctggcttcttcgactagaggtttagtaatatgaagctttaaataacttactcttttgctaatatgtgttgcaaaataatggagatagatagaagaaaattctatcactgcgttgctcggtatacaggggtttaagacactgttagtatcttttgcatcaaagcgatcataaagcaagagctttgcaacatcctcccaactggcaagtaattgtgagtttgtatgaatggaatgcatgctttcctcaattaattgctgcctatgattattcatatcatattctcgtatgaaatccgcatcataaaagttattctcctgcgactgatatacaaatttgtcatcgtctttcacacgcgaaaagatgtgatcgctgctatcacggaaccaagattcaaatccttgctcaagtatgaataataacgcattcattttgaataggctttcaaagctggaaactaacaatgggattttttcacgccttaagagctttgataagctgattgttgcagtctttgcttcacaataatttgcgtagcgttcattagtatgggcaacgaggattcgcattgtcgagattcgattctggggcttcccgtcaaatatgcagctagaaacaatattgatacattttccattcaacgatattttctccatcagtttctcgcatgtcttgagggcaacagatcgaacagaatcaatatcgtaccgacatatctccacaattcttaacgagaatctgtcaagaaaatcaaccacaaaatcttgatctttttcaggttcatgagaagaaagataatctattatttttaaggagatttttcggatttgtgattcctatacgttcagttagtatttaaatgatacagcagtagcgattgtttatacacttactgcatcagataacccccagccagaatgtctaatcaaatttctgtttataagataggtgggaagcaattggcaacaatcatatagagcagtaacacacactatacgaatgcttgcacgtatatcatgaatccttgagaatagtacactagtaaaaaggttagagtcgttaagaaaagtagtattgccaacctatcacaaatgtcgtgaatcatgtcaatgaacctagatgttaagtctctcagtaccagaatttccgcagtttgatttgatttttcggaaagtttgtttactataaggcataagcatcgcatgatatcacagcaaatagttgttgcagtatgtctaacaagcatccaaggacttgtcgtcatggtaaaaatccaagcttttgtagtttccatgaatgagtctccgaggaatgcgtcttccacgtaaactttactgatgaattcgaccaaaaaaagctgaaaacgaatacgcaccgttttagcttctttagagttagaagtataaagataatcagtataagcgcaagaagactagcgatatgtatggtaagtaaatattacaaaaagatgatgcacacaccttttgaaaacttgaacgattgacctgagacaatgtttcaggaattgaatctacgtcctgtacatcaaagttcgtaacgaagggttgacaaccagaggcctatgaattagtttacgtttcaaaggaagagtaaacaaaacagcaaaagctagaaaacgtcgcggatcattcctgctaaacttacaactaatgcgaaatttataaaggtcagcatgaagtcagcgctattacttttatagtcttcaaaataatgttgagaaagttgctcgagcggcatatctatatccaacagtttgacttttcgtatgcttgttagaatatattatcgaagactttttttctcttataagcaagcaaacttacgaaaaaattcttgtggaaaggcataatcatgagaatttacgtgcatctcttcattcgtctctatttcattattttcttcattctccgtcaaagaaaattcatcttgtgttccccatttccgctttttttctgagggcgaggcacaaatgctgacattctgtaaacttggaccttcatattcaacattttcaagctccacgctttctaattcagtaaggacttcattgagatgactgcttgcatctgattcaaattcgaatctcattgaaatcactcaattaattggtacgatggtggttggttatggcaaagattaatctaacagaaacgatgggtttgtttacgtgacacgagtcgcgtcagtcagtcattaattattttgcagttcacatacaaccattgcaatcaagtatataataatttattaaagttttacttttgaaacataaagtaactaatttatgaataagaacgcgtttttactcggaatttcgggcttttccctgaccccttttgagaacccaccaactcctttttctcattagtagtagctcggtattcctttgcaaagtcctactccaacttttggttaatactcttgttcgttggtttcatttgagatttttagttcttgtactgttgtagtactaatctttctggtcaatccaaaagattactttcctcgaatccttcgttcaatagtatcttcatatatttgggtgtagagtcattttttcgaatttttagaagtcgaaaagcatctaaatttttaaggatcttttccaaagagaagactagggttcctacctgagtaaaaggcagtttgaaaaccgactttcatcgcatgtccaaaactttctaaacaagtgtgtgctggtttactaatggacgtttcgactcaaacaagacacgcaacatattttcaagatgagaatcagctacaaaaggatcacatttatgtgaagaagaaaagtcacatcaagttaaatacgggtgttcgtgcacctttcaaggcagtagataacatcaatcaacaagatgaaccaacattgattgaagggaataatgaatcctccatctcttcgtccactggcgacacttttgaagaggattttgcataccaggacaaagtcgagatagaggaacggtcaattcgctccactcctaagtctattggagatgatgatttggaaaaccgtgagggcagctttgacgcacctgaaggaattcttacacacgggaagcatagactaccaacaattcccgagtggaccaaggaagatttagccgccctgtctgaagctgctgctcgattacaagctaacccatcgcctgaggatatagaaactgatccatccatggtaccagactatgatcctgagatatttcactacatgcaatctttggaaaggaagctggctccacctcctaattacatgtcagttcagcaagagattgactgggttacaagacatatgcttgttgattggattgtgcaagttcaaatacattttcgtttacttcctgagacattatttttggcggtaaaccttatcgaccggtttctttccataaaagtcgtatctttgcaaaaagtccagttggtaggtttatcagctttgctgattgcctgtaagtatgaagagatacaccctccaagcatctacaactttgcgcatgttgtccaagggatcttcaccgttgacgaaatcattagagccgagcgctatatgctgatgcttttggattttgacattagttggccagggcccatgtcgtttttgcgtcgtataagtcgagctgattcttacgatcacgacattcgcatgctcgccaaatatcttcaagaagtaaccttgatggatgaaatttttataggtgcccatattagcttcattgctgctactgcctactacttgtctatgcagatgttgggtcatttggattggactccttgccatgtatattatagtgggtacacggctcgtcaattgaaaccgtgtgccataatcattatggaatgtttggtcgatgcccctaaccatcacaatgccatttaccgaaagtactcggagaatagaatgaagcgagttagcgcctttgctcacaactgggtactaagtgtgatttgagtttgctttcagaagttgttaacaatgatattctgagttagtttgctattattaagcctacgatatttattattacggatcattgtcttaatatttcctacagcaatcactcgagggcattttatatcttacctaaggtagtagtttttctccactccgtttgctaagtttgtcgtttaaaccacccctattatcccccagagacttggaactactgtctattttataactatctttccgaattccctcttccatcttgttttctatatcttttactatacttaaataacgttacgggtatctctattgtaattattttttgataccccttaaaccatttttatttttttggattaatacctttttaatttaattttgtcctacctttacacaatcgtctcatccgacctttgggcatgatcgacgggttaattggactaattgttgctactgatctttatgtagttaggcttaaactttataaataacataactatttttaccttttctcttcatatttgtttcacgtcctgcattggtttcacaaatattattgggagatcattgacagtccatcacaccttgtataacgatgtttgcacaggtctagtattttcaatctggtgtatgttagtatgctttcagacatctattgttttgtaaaaatcagccatttgtggttcatccttagtagtaaagatgcctattacatacttcaagtctatttaagaactgagaaaacccactcgatgttttttaattaagtattcatacgtagtaatttatctcatttattcattttttagcaactctaaactcattggacaccaacaagttataatttcagcaatctaagacgtgttctatcatcgtttaatccacaacaaaactaacacaattgttttattaattatcatcatctttgtttggcatgttgattaatatcgagggaattcaagcattttgtcagacaattcgaaatcctcgtcgaataatcccacatgctacatttcctacattctcccaaattccttgtaacataaactactttttggaacaaaaatttcaagtaccagttgatattcgtgccttggttctcgacaaagataattgtatcactttgccaaatgagactacaattgctgaagcagaattgaaaaagattagggagttccaaaatatttatggagaaaaaaacgttatcttgctcagcaattccattggaactaggaaacttgatccaactggagaactggcagctcattttcagcagaaatggaatatcccagttgtacgacattctaaacttaagcctctgtgcactgaagaattgtatacctatttatcaaataattctcatgtcagtagcgcctctcaaatactctttattggagatcgcctgttaactgatattacacttgcaaacataatgggttcctggggtgtatggctgacaagaggtgtcgggaatacaacaaatatggtacggtcatattaattttgtgaaactaatcttcttctactaatgttcatttagatgatggaagtcgaatcgtggctttataaacgtatacatacgcaaaatccgtatatcccaactaacaggaaaagctgattaatgagttttacgtgtttgtggtaaaaatataagcatatgatacatgaacataaatgtcatgagttaaatttcacgtactgctcacccatacagatgatgaaatatggataaagcctttatacacgaacaaagcccgaaaagaaaaggacattaagttaaaacttaaacattgctacatccatctagtaaaactatgtaaaataaaatttccatgaggaaataaaaaaaagacaagacggcatgttttcaagccataacctcataaaacaaagggcaatcattaatatagatgaagaatgtatgaaagaaaaggtaaactataaacggccaaaagaagctataaagaatttttacttcaatgtctaaacataaaagcaagagacttgaagtccaacttaatacagacatcgagaaaaaagtcatgagcgtaaagggatattaagatcaaagagagcataaaggaaaattcttgaaacaagacattaagagtaatttaaacgaaaaaaggttgataaagtgcgcgtgaaaaaaccgaaaaggaaaaatttaataaaacaaataacagtggtgttcgccaactctgaaaatcgtatggtatacatcaatcttcatatattttcgtataattatgctacttaagagtactaaacgattctccgcaaccgcaagtcgatttcacattaggattagaaaaaataaaacgagattgcaaatcgtcatccctataatccataaccgatccaataatttgtaaaagagctcttctagcgactattatgctgataccatcttgtttgactatttcgtcaaacttgtcgggtttttctatgtattccaatgaatatgcctgaccagcgcatcctttttgcttcacaccaatacgaagcatttttcctttcatagaagccgatgattgcatcttcttcaaatgttcaactgctaatggagtctaaagaaactagttaattgacagctcagcaatacaacaggcaaaaacgcatgcgataaacatggtcatgccattaagaaaatcttaccaatttaataacattcttacgcggcataaatctggtggaagcaatttcccgttctgtgactggcttaggagcggtgctaccactgcctgccgcagatggttttaatgatggggtttcaacatccaaacgggtacgtcctaaatattgatgctgtgttttcaatgtctgaatctcttgtaatgatagttttcttaaaaactgtaatcgattaaccgatctacacctaagagcaggcttcgaaagacaactcaacatcgtaaaaaattattgcaaaattagatctttgcaacgaatcccttaaatttcgacaacaattaattacttcaaattaacaaaaaaataacacattcaacagcaaattctcagagttcgcgaaaattgtaacatataagggtgtttggctaatggtaagagcgtgtttatgccgctcgtcttagatctaattagatgaatgatcattggctgtaaaattcagaagaggagcgtaatgtgctagggtttttaaggaggtttgctctgaaatatagtaataaatgttagtgaatacggtagatactttactgtaagttgttataatgcgttatatggatacttgtttttaattgcaatacacgaatataatacacctttgctgctaacattaagatttttttggcttttaatacctagagttctgaaatctcattttagcatcggaaagtttagtcttgtactgaaattacgagggccaaaatgaaatgagccaactcagtttcactggaaagtcatcttcaaaaggccgtagtaggcttacacaagaggtgcgacctacggcatcgcaaattatcgcagatgaagaagcatcagacttagatgaatatgaagaggatttagagggttcggggaacgaagatgattttggaccatctatgtcccggagctctagaggaagaaaaagacgaaaaggtgaccccttggagcttcaaagtcaatttgaagaacggaatgaaacagacgcaataaattttcaactattggtacgaaatgtggtccgttatgcaatatgctcccaaacttctcataacacaattacacgaaaagacatagttcaaaaagcattccctgaaggtacatcccgaaatctttttcaatccgtttttgaagaagcagatcgacagttgcagctaagctttgggtttcgtctcgtcgcggttacacaatcgaatcggaaaaaagacatggcggtttctcaacttcgaagaccggccacatcgaatgccaattcatcaaatctacatagatactgggtgttgaggtctacccttcctatggaacttcaaaaggattctcgcttaattgtagattcggtattggatactgcttattatggatttttgatgactgtgatcgcattcatagccgtttctcattgcagtgtaggacattcagaactgcaatcttttttgcaggaacttctaacagaggaagaaacaacccctttgcatctggatattactcgctcgttatctcttttagttcgccaagggtatttagatagagtgaaagatgatacccataaccagtttgtttattatattggatcccgtgcagtaactgaaatttctattgaaggcttgaaatcattcgttacagagttctttccggattcagacattgatatggatgctctattaaccgaatatcggcaggagtatcagaatcaatcttcctcaagtgcagcatagatgactcttaggtttttacattatgctcgtctcatgttaatgctattgtatacttactccgctactacaaaaaaattcgtaatattatttaagttcctatatgcgtgctaatatctcgatataaatttaagatgtatatttggttatatagcgggaatattatgtacagctgttaaataaaaaaaataaaaaaatagctcgtaaacttataagagaagtatatgtcagtatatataatataattaataaaggtttcatcattacaaaatcatttaacttcatgcggcgcgcaactcatcttcaaggcttgcaatgcgatctcgtaaagctctcacatctattaacgaatctttgttcactttttccaaagaagcaattcgtttttgtaactcctgctcacgtttttcatattgtacttgaacggaaaacatttttgccttttcgctatttatttgatccttcagagctttcaattcaatagcatgagccaagttgacatgttgcaaagattggccagtaggttgaggtgatacttcggccccttttaactcattaacttgcttctctaagttgtgcttctcaagattaagacggtcgtagtctcgtttcaagttctcgtataacgcttgatttgcatttctttgctgtaaatcaaaaattgtctttcgttgtggaatatttttcaaaacgggttccgtagttttgacagccggtatattattctcctttccggacggtctatgttctttaaggcgatgtatctctgcctctcgcttcttgcaggaatcaagagcagaattcagttcctttcgagtatcaaccagcttcatttctacttctgaaagcttactacgtatactttcatgatcagcaactttgttccttaaaagggtgacttccgaacggaggcttctagttgtttttacttcttctagtaccttttgatactcaacttcaagctttcgtttactctccaactctgatttcaaagagcgtaattcttcgttatctcgactagctatcaatgctttacgcttttcatcttcaaaggtcttaccgagttgactgtactcgtgcattaagttagtaatcttcctctcaagttcgggaaccttagatgcttttggagaaagttcatttacttgcttcgtcaaactcgataccttattagagagatctttattctcggagctcgccaacgaaagcttttccttgtaggacgccgattgccgaagaagactttcatgattaaaggtcaaatcacgatgttttttcgaaagttcctgaaagtttgtatcgacgtcttttaacccctccaagtccagctgaagtccttcatattttttcttgtaattctccaagtcgctaactttaagaagtaaattctcatggatttcttgcaattcaatgtactttaaagaagcatctgacaaattttggcatttctcttccttattttcaagctctttcgttaacgatttgatgttatttaaacattctttaactttggcttccagttctttatttttggtagcctggagctgataaagttgatctttgtcattcaaggattctagttctttcttcaatttcggaagctgtttgacatcggcttccaaataattaaccttctcttctaagttatttattgttaactcttgcactcctttcaagacgcttaactcttctttctgctgttttaaaatagagacgtcgcttataagagtagaattttcacgttctaattttttgactcgtttgagactctcagataaagaaccttcctgctgaatactcttttcattcatcttctgatttgtcagtctcatttcttgaatttcagttttatagtcagaaatatatttagtgagtttatcaagttcagcatccttggtaacgatagtttcctgtaaacttttacattgttcattgaactctgctttttctgataaaacagttgcattgttctcacgtaaagactcaagttctccctttgtatctagcaaatccttctcttccaaactcagtttttctttcagttcgttctgttctgataacaaagtctcaaccttggaagttttttctagtaactcactttctaattcgttattaatctgtttcaatgacgctgactctcgttgcaaattttcattttgctgttttgtttcgctaaacgaatcttctatgtttgcaagcctttcctgtgttcgacgtaatatttcctccttatcaagggctatcgcacgttcagtagtaagcaaattttcaacagcagttaaagaattgttggtctcgacgagatcacgctctacctcagattttgaattctgttgttttttcagctcgtacttcagctctatgatttcagcatctcgctttttaagctgcttatcattttgagtactacttaataagggccttagattgaaaaataacttagcccaaggaaaagttctaaattcattgtacacttgcaaatttgcttgtagtaatttgatggcttgtatgtccttcaatcgcttttgaaaaatttttctttgaagaaagccacggatccttgtttgtagcatagtcatcagtctttgtaaagtcgctacgcgcctctcctctaattctgctaaaacacctgctttgaaaaatatttttgaaacaccaattcgataagatgcttcgtcaattttcaactcctccaaaatcatgacagaagcacgtcgagattccacataggtacctgttggtaaatgcgccattatctcatatctgactctaaaatcattaaatggtaaacggttaggaaaaccagcccttgtgattctgattccttccaaaacaccattacatcgaagttgtcctaaaacgaggggtctattaaaggtgtgcattttcttttcttcgtttggaacaatacaacgaataaagtgaggttgggtcgagttaaattgattcataagctgattgagctgctctttatgcctttgagcaacagttcgaaaaaggccctttttcgtccttcccctaacagttttagtctcagtttcctgataatcagaaaatagtgtagcgacatgcttgttagtagattgcgcaagcaacttagcaacgttttcattcaaaggatcggtgttcttctccagccaaccttctgtactgtaaggaacatcagcggcataatgagtcaaaataaaaccttgatcggcaaacttaaaaggtttatattttagcgacttgttcctccaaagagcatcaagtttagaagtaaacgtagcatcagttgctttcggcataacacattcttcatccaaacatgaaagaatacctattgggtttgctttctcgattaaatcaatagtcggctgtaaatcatgtccaaaatcaatgaaatcccatacaatttcttctttcatatattcttcttgctccaatacgaacatgtgatggttaaagaattgttgcaacttttcatttgtgtaattaatgcaaagttgttcaaaactgtttttctcaaagatttcgaaaccggcgatatctaaaataccaataaagtagctttgggcattggaatggttcaaggaagtgttaagtcgctttaccagccatccaaaattcctttcgtatatggcttttgctaatgcttcaatggacgaaatgacttgagtttgacttcgagcgctgataacccattcatggcctgctttaatacgaggtcgaacaagattttgtgaaaataactccggagacacaccaagcaaatgacagagcttgtcaatctcatcaggattgagaagacgagctataccagagcgatcagcaccgacatcaatatttcccatatgtagaataatggaaagtatattaaataaatcaaagttctctttatcgtcaaatccaagagttttaaaagcagctaaaagagttttaaactcttctttatcgtcaactccatcaataatgtgaaccgaatccttcaaatatcgataatcattacagttatcggttaaaagaagtttgttcttgagagcagtatcagcaccacttaaaagctgataaaaaacatggtagtttctttcaaactcgttctgatgaacaacgcgagatttttcaagaagataccattctatggcggcattcgaaatttccccactcaaagaaaactcaactttaatgaattttccaaaacgagaagaattgttgttgcgtacggtacgagcattaccaaatgattcgagcacaggattcgttttaatgatctgctcttcaacctgactagagccaacggtagtcgagctagcaattgctgcaagatattggatgattcttttggtattctctgttttacctgcgccggactcaccagttacaagaatcgattgattttccttattttctaaaaggttattgtatgctaaatccgcgattgcgaagacatgaggtagcttgcgctcttgtgttttatctttgtacaattgaatgatgtccttcgtatagattggtagtccacaataaggattgaccgcaacgagaaagagcccagaataggtataaatttgatcagagagatatctctgttcaagattgtatgtgactgcaggctcgtttaagtatgtcaactcagccatgtcattgactctatcaaacttggcaggattcaccggatcaatttcatcctcaccaacgatcttctcatccctggaattattataccgaacaacatatttcttgtctggcagatcctctttaatccaagccttggtaaaggcagtctctgggtcggaaatccaaacccatcgtttatcatcaatatccttcagactagttgcaccatcttttgcagttattttattagatattacttctgtcatcgggctactctctaagacggttatttaccgcctttcctgaaaataaacaatgcggtgtacaataccaaaaccttgtaaaacaataaggatagaccaaaaatcaaagagtgaaaaaatccaaaaagatagcaatagatatatccgaaaagaaggatcaacaaatgcacagagaaaacgttaaagaactatgttgttggatactttttgtactccccgttgaacgcacagcaattaatgatttaagcacttgaacattcgattaacgcatgcgttaatcgaacgtttatgtacttgatcatatttgcgttaaaacatttagtataggttaaggtagcatccagaaacattcctataacataatgattttaatatcacaattaagaaggtatatatatcttttaaaagaaataatattaatagatggaggtcattatatactcggtcttttgcaattaaagtcctgacaaatttttaaagctttactttcatcaagattgaagatattaagtaataattgaaaatacattgtactaatactcaaaacatcaaatgaacgtaggattaggggttacggtttaatcgaaatttcatgttcccccgtgcttttaggtaaaatgattgtataaaaaactcccgctattacagatatatgagtaatttgtgactagatacgcaaataatatgttcctcatcgtaccgaacacaacttttaaagcaaataactaaactcggcatttatttatctacattttatatatagcactctaatcatgcctcttactgaataattataagaacacgctctagctaataatcgcaatcagtaattattatgtgcttactgaccatctacagctatggccctggtaataatcaataagtaaatatacagaaatgttagttgcttcagttagtgtttgaaagaaagcatggtgcttcaatgtgtaaccacatctttaaacttatgatcaaaacatgcagaataccataaccagttacgtaaaaaaacaacaatgttctctgttttcatcaactgtagtcggcaagtttatgcaacttgtacaataagccaattttggcttaacactgaacataatgatagtagcgatcattttaagtaattaaaaaatgttaatgcatgcagattttaatattcctttgtgataaaatgggtagggaaatgtaaaaaaaaaaaaaaagaagaaataaaatttcaaggctgcgataaaatatgattcgaaagatgcaggatgttccgtaaaacaaaataagataaacgtttccgatattcaaaagtatggatgagtaaaaaagacaatcatggcaagaaaacttgtaataaatatgataattatcaatcttcaattatgaaggagtttgtttttgccttatttaaagcgagtatcaaatggcgatcgtgatactgaggatgaaccatgccaaacattatatatttcccattggctagccaatcactgttactagggtagtatttaatgtcatttccttggataatttgattaagtttcctagttcgcgtgttccatatttcgacaaattcatcattaaatgcaatgagatatccatgacagctggtaacagagttcggtttgccaatccaatcaaaccaacactctttattaaccatactaccctctccattgacaaacacggcaccgaattgatagcagcatgcaaataagctaggatcgtggatgcgaaagacgccaagcggcttactgttgttgattcggttccgaaacaacgtatcattaagcactgaagggcttggaaaaccaactgctaatttagggtccaaacgcagaacgtcaatgcctttattgtgacaaagagcaattgaatacttaaagcaatcaattgaatgacagttagccgttacgtgaaaatcatccagagttctgaaggaagtaacatcttttctcttgaaggcatatgttttctgatagttatgtcctaagccgatcactggttcacagcaaattatggttgtagtattaccgagtccctctttataaaaaaccaaagttcgctcacgtttaacagaagccccctcagacaatttacctattttaaagaatgatacggcatgcggagttccaatgacaactgcaattttggattcgatcagacccatttcaataatacgacttaatttatgagcataaagggttttgtcacgtagctctaataggatatcaaattcctcaacaactccaagctgggtaacgcgtctttgactagagatctttttccaatcgcgaatgtcactggaatcaccaaatgcgcctaaaaagataccggtagatgtagcaatcaaaaccgagacatgaccttcgtagtcattaaactgggcaatacaacttatatcgccataggcaataggctctggcaaaagctcctcacttacaattgggtgtttccacgctacctcattgagtgcgcgatcaatcgaagagccttcaaccaaagtaatttcattaaagctgtttaatggttcatttccattaactaagtcggaaggagggtactgaaaggcaacgtcagatacaactttcaatgcaaacggattcttaatatttatcttctgagagtgtcgtttttttgcgacattaattttttcaacccagagtttacgaagctgaagtgactcaacgtagagtgtataactagcggtgtaagcaccaaggtgccttattgtgaaggggtaaagttgagacttctcaaatacagcagagttcattgagttttcgttattcttttcagcagtggcatcgaacattagttcaagattcaccttactcttccttttactcttagtggtaagagattcctgtggtaaattgccagctaaactgccaagaaatttattagtgtttgatttaagttgaaaatcgtccattttagggcttagaacaagcaaatctaatggtattggcctttttgaaacaacatatcttgaagcatttgttcgtttgtcttttcttgctttggccatgatcaagtaattatcgagcaaaaacaagtggatgtccaaccaatccaagcgggaatcacttctacgttgaactattccttcaaaaaagaactctctttcaggatcccttagctctagattgacactttcatgatttttaaacagaagttgatacgatagatcgcgaatacgattggcctcaagtacggtagctataacggcatcacattcctcgcaagttgctctcagttctttgacagcttgagttattaattgaaaatcccagctggactgctcggtatgctttaaaattgtatccaactcaagcgtgtatctttgtaaacgttgagtaggtctttgcaagaaatgctggaaatccaaccgacgacatctaggatctgatcgacaagcagcaagccaacgtgcaaagtaagtattcctttgacattctagcttataagtttcatctgctaaagggaactgtttggcataattaatataagaggatttagcagcatgaatccactctagtaagatatcaccaataattgaaactactgggccctggagacgttccctcataattaattgtggtaagaacagtcgagaatgcaattgtctgattgattcaacatttccaaatacagattgaataaagtcagccactcgattgctgggaacaatcgcatcttgctgctgcacaattccgtccctaaacagttcagctagggtatttaagtctgcaacgtaatcagattccttacaaataagctcgtggatattattttgcctagcaatctctcttttactgagagaagatggtaatgaatttagagaagaaatgttccagaaaatgctccaagtatcgctactctgtcctggcagagaagtgaattcaagcgacgagttacgagcacatctacagctataacattgatatttggaaggacatgatctggatctacaaatgtaagagtaacagccgccgttggtcaaaaatggaagtactccactaccagaaggaggttcattagatgtgaaagcaatttgaagcttttcaagatttatgacttccacaagaccgtaattaatccaatcaccaaggatgtttttcgcgataatttcagcaatcaaaaattccatagatgcaatgtgaatagtaaatagcgtagccatcacctgagctacttctcgacgagacacaccttcgtggaccaggccaccaagagcagtaaacacttcttctttgcaccatttgtataatttaccgaccaaccaaggttctctacagctgctaaaaagggtttccgattgagcacgtctgtgagttcgagttatcaaaggagaagaaatttttccagatgcatagtcttggacaggtatctttggtagctgtcttgtagaggaaatatcagattttaaactataaggatttgggggtgttagatattcgacggaagggcttaaaggcgactgtggacgaagagcgtcgctcgagtaaagacgaatcggactaggagtgcgagccggtgatcgagtaggtgataaaggaagatatggctctggtgagcaggataacgatatgtcattgtatagagagtaaagactagtggaggatgtggtgctgtaaggagaagaatgcgaagaaacagaagaaggaaggggtggacgtggtaaaggatgcactaaggacccaccaggagaaacaggcgtttcaggtaatggacgaaacgaatctacagtattttgtttgtttccaggagatgttaaaaaggggtccgtgtcaagcgggttgttaggactgaaatcatcaaataaggcattaggaaatgaagagtaagtagtataggctgcagaattttgaggttcattcggcaattgtcgatacgttgttcttgatggagatgactgaaccgtgtaagacgcgactctacgagagttaatggatgctggatgttgaggaggcgaataagaaaaccgatggggagaattattcgaacgtttagaaagaaaaggaggagaaaagagtctggtggtagaaaagtcggaaaacgatagacgtttctgaaaagatggtggagaagaggaatgaggaggataagtgtcctctgaagagtctaaacaaattcggctctttccaccatggtctttcgagctccgatgaaaaagttcattggagagcttcataaaagaaaaagtggtagggggaaccacaatcaccaaaaatgactaggtcaaaaaagaactacaataatatttgaagaatcaaggcaagctaaggccaaataggagtcaatttcaattgcaatccaagaaagagaaaggtcaaaactaaatgttgcaggatggacagtgcaacaaaagagaaaagagaggtgaaaaaagatagaaaaaggaattgagaaagaagagtataaaaaaaaagaaagaaatgcgaagagaaattaataaatggaataaaataagggaaaataaattaaaatagaacaaattcagtgtcaatggaattcaaaaaatgcaaaccaatctcgtacgccctcaaaaaaagcaattttatagtaagccggaatgaaaacgattgatgctttcaaagttatgcgatgaaccagagaaactcccgtcctctattaataaaagactttgacataaaattacgaatacagaaagaaagaaaaaaagaaagaaagaattgtatcgcaatatcaatgcaacagtctgtttattcggtttgtgatgccacaataaaagggttagggcggaaggaataatataggatgatctgattgaaacaacccaaaaaggaaagaaagctcccaagcgtttcagaggaatcaagtttcgtaggtttatagacagagaaagagagaaagcaaaagcagtatattatgaaaggtaatgacttgatcaaaaaaacaacctcttctaatgaaacgtttgggataaatcaaaatcgatgcctaagaaaagattataggactttatggtttttaaatatatgtgtaaatgttaaataacttataacccaccaccaagggatcttcgtggacggcgagcggagtggataagaaaatggctggttgtatgttcgcgacggaagaacaaaattggtctttgactagcaaattttccaaatttagattacatgatttaaacgataaatagggcaaataaagtgtacaaaaagatatttgatcaatttatatgatgttgagcacaagctgaatagtaaacaatgcgaacgcaattaaaataaaataagtcaatacagcatagtcatagaaatcgatcaattgaggttatccggattaaagctaattattttagatgatgtttttcatatttgtaaatcggtaatacaattatgagctggtcggacagaaaaagtgagcacataaattgcagcaagtagaaaagcaataggcaatataaagtaaaggagttcattcatgacttccctttttatataagcgtttttttttttagtggaaagtcgaccaggatgcagttgaatgttgatattaactttgttaggactagtgaaaattcagatttgtactttttttttaaggagttcaagacttttttactacatattcaacattgaaatcaccttatctatagaagaagtagataaacttagcccaaaacagcatactgatgacttatagcttctcatcccttcataatattaatgcggtttactgctgctgtaacaattcttctgatatattaagtatacgtatttttcccttcgaggataatcttttcttaatatacctgttgctctctcaaattgctaagcagacaagtaaacaaatcaattgtttcattgaacgaaccaggacggctatataaacttattattataatttaaatcaaattttaaacattcaactctggaaacactaacaaaagcctttttttatgtcgccttttagcatgtgtttcgagtggaaaccctccatgcaaaagaaattgaaggtgaaagcaatatactaaagcaaaacattaattcatcaagcaatacgcaatttacatattaatggtctttgatttagaaaatcgtataaattagaatttttcatcatcttaccgttataacgagttcgtagctactttcgcagaaagtttgtggtcaaattatcttgtctttttctccaccaccaaaccctcgttttcacgggaaacattcagcattgtcgattcgatcgtcaaactgattgtttttatagtagcaatggattaccggcatccaaatgcactcggtgtgaatgagagctcgcgtgcttatgaggaaatttttggtgctccaagaaaacgggagccggcgagaactgtaagtactcctgcgttcatggaaccggctccagtctcaaaaaaacctcttcctcctcccacgcgaaggcttcctcggaaacctttgccctttcgttccacgagtttgcagcctccatcgtctcaacctcctgcacctccaactcatcagagagaagcatctcctgtgaaaaatattgagcacagtgaatcttttccttccgtttttggtacttcaaataatcaccagatcgtcccattgactcttaaagacggaaatgattttggtgctctatatgcatctttaaacaccacaccccattttcctcaggtatcgaatcatgcgcccaataactctaattccccttctttgacttggcacacatcatccggtgatgattccaaccaaaatccttttttcgttcggcgtcagtctcagagtagcacgtctccggtttcggattcagtagatgagaacctcctttcagcagtctcttctgttacagagtccgtagaaacaaaccttcatctcgatcaaaattatccttacggctctcctgttcgttcgtctaaaaatccctttctctcttcaaattctcgattaccaactgatgattcttctcacactgttggttctcattcatttacttcaggaactcacccacccattgtttcttctaattccgcctttacacttcccaatgctgttactcctgcagctcaagcacctctcatacgtagtgttagtgaatatcctgctaacgtttctccacctgcccagtcccttcagctaccaaaatctactagcaatcccgcggatcttcatttaagcatagcttctgctagcagccataagaatattttttctgggttggacgtcttttctaatgtctttcatggtccctctaccacattacgagacagagaacatgatatgcgaaatcgctcatttgatcattctaccttggctcattatgaagcagttaagcagcagagacttggtgttgaacctactgcaaggtcctttacgttgagctcttataagtcccgtgcaagtggaaattccctaattaatgatcgaagctctacaacaacgccgacgtttgttaattcggaagctagctcgcctgttcataaaaataaacgaagacgcagaatatatgctgccttactttctcgtgttgccagcgaattgttagatagactacagctaggtgatatcacgaaagacggtttaatttattctaatgcctttactggcgatcatgcagtcaccgtgctaatgggtattatacatacttctgatagaaatctcgctttacttgtcggacgctctttagatgcacaaaaatttattcatgatgttacctatgatcatcgtcttcgtgattctcatcgtgaaatatatcagcttcaaggtactggttatcgccccttcttacgcgcaaatgataatgcatccattaacaacaaaaaccatcataaggaattggaggacaatgagtcgggcactcgaatctcaccgtccacgttaggtgacacttcttttccaaatggtatatttactttattgacgcattgttactctccaacatgtgcaaaagatcatccctgctattctatttcatgtcctcgacgattggaacagcagcacagactatttgccaaaatgcgtgcaaacactgaacagtcttcctccctagcgtttgatgataaggaacaaaaattgtggattcacagcgtaccccaggagattgcttatagtgtcagtgaccgggaaagaaagcgtcaagaagtaatttgtgaggttatctatactgagcgagattttgttaaggatttggaatatcttcgggattattggattaaaccactatgggcttcatcttgtatacctgaacgaaaaaaagaaaaatttattcgtactgtgtttttaaatgctttagaggttcaagcagttaattctaaattggctgaagctcttactaaaagacaaaactataaacccattgtggataatattgcggatatatttttggagcacgttccaaaatttgagcctttcatacgatatggtgcaggccaactctacggaaaatacgagtttgagaaggaaaagtcatctaatcctgcatttgctaagtttgtcagtgacgttgaacgtctgaaagaatcacgaaagctagagctaaacggctatctgactaaaccaactaccagattggctcgttatccattacttctagaagcggtattaaaatatactgatgagggtaaccctgataaacaagacattccgaaggtcattaatatcgttagaggatttctctcacgtcttaatgttgaaagcggaaaagcagaaaataagtttaacttgtttcatttgaatcaacagctggtctttaaacctggagaacattatgatttacatctgcttgatgcgaacagacaattaatattcaaaggacccttgaagaaaagaagtgctggttccacttcttcagagtctgcgtcggatgttactttgtttctctttgaccatgctttgttgatagtaaaaccaaagactattaataaacgtgaattattgaaagtttttcaaagagtatgttttttctattcatttaaattgttttttctaactagtatagcctattcctctattacttcttcaactattccttgttgatgataatggattaagaatcccttattcaagtaagcaacaactagcagctgtatcaaaagcagcgaatgggaagccaccttctagattttatccatttagcttacaacttttgggtcgtagagggtacgaaatcactctttatgcaaccactgaagttagtagggataagtggttagagcatattgacaaccaacaaacattgctacaacatcgtaaccagtggtttgagtctgttaccatttgctctaatttctttgttggtgataataaagtaaatgcgataggcgtttatgatagtggtcgtcgacttttatatgggactgacacaggtgtgtacgtctctcttcgaaaagcaaacagcccacttcaattcaagcctgtacgtgcgttaaatattcccaacatttcacagcttgaggttattgaagagtatagtttattgctactgctttccgataaggtgttatattcgtatcctttggaaatgattgatgcggatactactcaagcccctaaaaaagcaaggaaagtttctggtcatacaactttctttcgcgtaggaatttgtctgggtaaagttcttgtgtgtgctgtcaaaagttccgtcttgagtgctactataaaggtttttgaaccagtcactaattactctaaaacacggaacatgccaagcttgaaaaaattccttactgttaaccaagacccattgaggattgtcaaagagctttatatacccacggaatcaacttcggttcacttcctgaagaataaactctgtgtcggatgtacgagaggttttgaggtggtcagtctcgataacctagagacgcagtctctactggatccagccgatacgtctcttgaatttgtggagaagaaagaaaatgttaaacctatcgctatctatcgtatgaatggcggtgaatttcttttatgctattcccaatttgctttttacgtaaatcgagatggatggcgttctcgtcctacatggtttgttgtttgggaaggaagtcctcaaaactttgccttaagttatccttatatattggcttttgaacccacttttattgaaatcagacatgttgaaacctctgaattgatccatgtcatttccggcagaaacatccgtttgcttgctgatggaagaggaaagttaggggacggtggtgaaatattttatgcgtgcgatcaacgtggtgaaaattgtgagacaagtgttgtttgttcccttcgattgacgagtgctgctgcccacgccaaagagcagcatgtagacaagtaattttggtttttttgaacttaattttcacgttttatttataacggttaattggatattggtttgttcggttatcttttcttttcttttttaaaaaaataatttaggtgcatgaattttaatgataaataagatttttttaaaatatatacgttaacaatattttaaagtgaataactagatatattgtaggcaaaaagtactagcgaatatgatcaatgttactatactagaagtaaaatatttttagtcctcatattctaggggatcaccatatacccagaaaccgatatgatttagacgtgcttcttgctgatgctcttctagaatattgagggatgcggtatctttttcaaagtgagatgtttttttcttgggaataacactagccatgccgagcgcaaccagttgggcattaatacagtcagaaaaatctgaaccatcactaggattatacaaagttacagaatacacgtttccttcgtgtccatcgactttagccactagacctttattcatggctagctccctgaaaacgagtcttgcgtcttcatagtaatcagagctgggaggaggtaattgaacgtaactgagacgagcaagttgcgcttgaggcttcaatttagtataggtatctggtaaagaggatatgtttttgaaaggaatttgctctacactaccataatcataaagcaaaacatcagcggcctggttttctcggtcacaacgcaacacccggcctcgatacatagcgttgtcaagagcagatattgctgcaacgttcattccaacattaattttctcggatggtttaaaggacttctttaaagaacctaaatcagacattaaagtttctaattgttgaataccagtaccaataatttggaatgaaaacttcccgtcttctgcaatatcgcttagtacaatatcgagatagataggctctttaacggtattttcactttccttctcggtactagcagctttcttttcagggggaacgtaatcgtgccacatgccaaccttttgctccttagcagcagcttcggtatcatgatattgcgagtattgtacgtttgattgactggcataaccttggcaccaagcaagaccttgactgagcaatttcaaagcaaagttagtatcatgattgacataaatatcacctaaaaagcacccattattatcaacagacaaaatctcaacttgagcatcatgctgcaacaaggactttgctaaagaaagagattcttctgcaaaaggttcacctttttcctgatcgttacgagcagtgcgaggagttcgaatacctgcacatgcaaacataaaatagcagttttctttagggcaaaagcaacggaaacgagacccactaattacgttttcgatgatgacagaaagcttacgggtcctttgcaaagaggaaaggtattgccgagagcgtaaagaagattcagaagcattaacgatattctcgtaagcgggttttttaccagaccacatacccttgcgtccttcttgagcggccttttcagcttctataagaaaatcataaatgggtgaacgatcaacgctatccattcgatatcttataactgtagcgtatccactctttacgaccattaaagcaacatttgtaccatcagaaagcttgacagtacagttgttaatagcaggaaggtcattttgaccaggtcggatgaagtctagcgagacctgaacacgcttcccaataattttcttgcgaagaaactcgcgagcttccaattggtaaggggcttccttttcatttgaaggtctgggatgacggatgctgctaagctgaattctacactccacgccattatctttgcgaacttcgagagtatcggtggaaatgaccctggatacaactgcagaataatcctttaacgagagagaattgatatcagggatagagacagaaatatttttccaaattcctaaacgagaaatcttagctttacgttcaatggtccgtaaactttgcatagtctcaggtcccaaagcagatatgtggttgtcagcaacacgtcccaatccagagcttaacaagaaagttgcgatatttcctgcaggatgtaaaacattacccaaaaacgagacaccgtttggagctaaatcgagaagttcaattaccacgtttctttgaaggagacgagtgacaacaaactgcttagcttcatcaccacaaggttcttgctctgagctagtctgctcaggtgaagtagcagtgaaagtagaacgagggcatctaactccagcaagactgattgtaaccagttgatgttgcttggggctcaaaaatagtcgaacacgaacttggtctccattgcggatggtttcaacgataccgttcagttttttacctttatgggcctttaaaaacttagctgggtttgctgggttggctttctcagttacaacaacatcgtcagaagggccccatattcctaatttgtactgctgggcatgatcttgcgcttcttctagagaaacaaaataggagttctcagaagtaccctcattacgggtagcctcaggtcttaattttgcaaggccttcgcgcaataacgattcagccaagtcaaattcagaagtacggatacgtccatactcgcgtttcgacgtaggaatcacgtacaaagtagaaactgaagcaggacgtccaacaacgagtcgcctagaaaattcttgggcttcaaaggcaaatggttcatcaccttcacgacgaaaacgcggacattctacgtacgcgagagagaactgtttctctgtaatttttttggcattatcttttattaaaatattaaaactatcaccgctttgggcatatttaatcatggacgatacatactggctcattgtttacaattttgggcctatgtggtagaaggaaagttctcacgtggtaaggtatgtacagggttttcacagcgccaaatatttaaacataaaattttaaaaaacatatatttagtaaacttattcagtgtaaatatacttatttctattttcgaatcctagctctgaacaagttcttgttctttgtgataattccaacgtgtatttaaagcagtatataaaggtcaaacaccatcaaatgaacagtttatcaaatctcatggaaccatttattaaacattatactttttgcttaaataaatattcaaagtgttttttttttttttttttttttttttttaatgcatatggtaggaataggcattatttattaaatggattcgcaaatggttaatattgtgctaggagatatgttgatttcaattgcaatatcttttacctatatttaaatggcactatgtagaaagctgacaagagaatattttaacaagcaatcccgaatcatcaaaaataaattaaaataattttaaaaaataaaaaaaataaatcgcagaagcacaaagcataatactattgataagttcaatgtaatttaatttggttcattactatttaaaactaaatccccatcttatagtaatatagaaataaacagaaagtatatacaatttctctacaggatgaaagaaaaaaaaacccccagaaaataaatgagggaaaaaaataggatatcaaatattgatcgaggaaatcacaagcatttccttcagtgtaagaaaagcaaaatagggaaaatcgtaattgtacattgaaagcatacatttttacaaaattgtaaaatttctttatttaaatcgtttccaaaatgaaccggaaatgttataagcaaaaatatactaaataaatgaatttaaaactatttcggtacactaaataatctcttataaatttattaaatttaaatacataatctacttaatactaatcgtctcaacggaggacaacgtggccgagtggttttaaggcgttcgcctgctattctgtagcccagcggattccctttgggagcgcaggttcgaatcctgccgttgtcggcatgattttttttatttgtaaaatgaatatcgaagagccttagagaaatatgttataggaatttatcgaggcaaataatgaaattctagtaagagaataacctgatggttaaagcttgtttattgatcttcttgcagattttttattgttttcatgagatggataatactttaaatgatttatgttctatctaaagtaaaacttggcgaaattttaagaaaacacccataaaggtgtaactattaactaagaagagttcgcaagtcagtgatttatttttttcaattgtcccgagtgacttaagacaccgactagtacaatttgtcaaatttattgtaaatctatttttctttaacaaaaagtgattgcaagcgcttctcgatcctcaatggatcagtcgctaactgtgtggaataagtacatttcgcaagtaaaaaaaatggtaattctgacgtatcgaatgaaggacataacgttaaacataattgaatactaattctaaaatctatatatgttctctttatttaaaccgtactactagattgttcctcaatatcccaaataacacctaatggttctttaccatttacaacaatcaagtgattgtcgaagaaacattgcaagttgagaaaaatgaatgaagtagaaatattctaatgtgctaatgatttattgtaaaaataaatcatattattttatttctttgactttcttacatagtcgaacacagacaaatacaattttcgattaacatttctagagtctcacttgatagattgtgctttactttatttcataagtattcctatagtactcaagcgtgcttggtattattattgtaaacttaatgacattcttgttagaacgacaccccatttgaacttagcaatagtttataattatgaaaaaaacaaaaacaaaaattttattttgattcccaaattgtaaacagacgcttgaaacccttacatgtacctgtgtctgctacccatctgtacatgagttgtatagtaacgtccaggttgtcccataaccaaactccttgaactttgaaagcggctctttatagagtcattttttatttcctatagtacttgaaataatattattctctaaaacttttcactcaaagagcaggacgtatttgctccttatatatgcgaaggcgttactattgacctttttcatcgcctttgatccacttttggttaaagattttatcctccttgcaaagttttttgtttactgtctaagcaatgccatttatcgagtcaatggcccctttatcgcgcgcaattactcgcggtatctctcaattctcatgctactctaacacattggttttaagaagttcccgtaactcttcttcatcattagttaaacgaagttatgtatcctctcgtgtttcacccaaaaagccacagcataattcggatgccacttcttcagctcaaaaagtcgctaataaaacgcacactagttctgtccttccaggtactatattaaagggactgtgtataaaggcgggtggcgtcgaccctgtagctcgtgaagatcatgaatatccagaatggttatggtctcttctggatgagccagctcccaattctaagactgcccgaagtcatgctcgtaaaagtgccattcgagcggctaactttcttactaaaaaataattaccttttagaatgtttgaaactcttaattttccatctcctctctatccttatgagcatttgatccattctttttgtttactttttttgaggcatatgacattcgctactttaccatttcccagaatccaaaaatcattttaaaataaaaatatattaaataaccttatatcagtgatatacatttgtagcataaaaaaaattactactacatgtccttctttaagagaagcatattcaaacctcaacctgccaaccttagagaaaccggtattgcccaaactgtgtatcgtttatggaatttggctgacgaaaatgtattctagaattgtattgaacgatgttgagaaaaaagttgttaatcttttgaaaaagactgctgattttattgaatctaaatccagcagcagttcgtcattggaagttagattggcaggaggatgggttcgcgataaacttcttgggctttctagtgacgatttagacgttacgttgaataaagttaccggtgttgactttgcaaattcaatatttgagtatgttcactctctcgactctgactcagttattccatataaagacgcacttggcaagctaactgtcaatcccgatcaaagcaagcatttagaaactgctaccttatccctatttgaccttgatattgattttgtaggacttcgtgcagaatcatatgatgataaaagtcgaattcctagcgttaccccaggaactgttgaaacagatgcattgagaagagacttcacggttaacaccctattctttaacatacgaacagaaaaaatagaggacattacaaagcgaggatataaagatttgcaaaccaaagtgttggtcacgcccatttcacctctccaatcatttttggaagatcccttacgaattttgagaggcattcggtttgcatccagatttgaatttacaattgatccgtcggtcgtttccgctatccaagatccgaaagtatgtaaagcttttgaaaaaaaggttagcaaggaacgtgtaggagaggaaattgagaaaatgttgaagggtgcaaacgcgaagctagcacttcaactgttatattcaacgaacacgtatcagtttacgttcgatactttgccagctgaaaaagaatttcaaattccaaaggcattggaagctaccgagtctttatttcagagtcttgcattgacgtttcctaaacttatgaaattaagtgaagatgagaaaattgggctatggctatatgttgctctaattccatggtctagtcaaactgttatggttaagaaaaaacaattttatattcctgcaatcatcgcaaaagacaagttgaagctcagaagtacatatgttaaccagttgaatcagtgctgcacattcaatccgatattcgatgaattagttaacgatacttccactaaaaattgctcatctattggcagcttaatacgacaattgaataaatcctgggaagtcgtgtttttaacatcggtcatatatagttgttgtaaaacaccggcagcatctgtatcaaatacatttagttcttataaatctctatatgactttatttatgacaaaaatttacaaaatgcttataacatgaagccattattagacgtatgtaattcttttatttctgttaacaatattgagcgaataagctaacaattttttagggaaaacagatcatgaaaaatgtgggagttaagcctggcccgcagctgaaagagactatggataacatgatttcctggcaatttaaacaccctgaaggaagtgtcgaagattgtgttgcataccttcaatccctaaaaatataagaaaagacaatcactgtttagataacttaatcgcacaaaagattaaaagaataaaagtcaccagtaatcgtcgtcctttttggaaattcgtatttatgatatttatgcttaattcagaatggatcctttcctcttattattaccaatctctaaccggctctcgataatcgtattcgctggtgcttggtgtaatttcggtacagtctggataacagtagttcaatttgacatagcatcttgtgttttcattatcattattaaaaaaacgagttccacaagcggaacattgcaaatttaattgatcaaattcatcaatgatttcgttgcctgtgcgtgctggataatcaccttcgcactcataaatggcagtgcaagaactagctgtataagaagaatatccatggtagatcaaggatctattatacttcatgtacgcgttcggacacgcacgattttctcctcgaagcatagggcaaagaaatgagcccttacagttattaggatgaaccgaattatcatatccaagcatgttaaataaacttcttcgatagtttgaagtaattcgagagccttttgcttctggctcaaagacagtactaagatcacttctaattgggactgcaatgcatatgtaaatgcagattccgtatatgaataggaacaaagttaatttctctgttacacaacaaaatttccacattccttccgaaatattaatatatattaaatatgcaaaagtgtttaaagcaatgcttcttatttgcaattattcttaattaattaatatttttcttttggttaaggaaagaatatgtaatataaacagtattcttttagttggtgtcaatatttttgtttgtttttaagatcgtaaacagagctttacaaaccccaaagcaaggtgtcttcatctagtgaagcatccgagtcattattagataaattgctagattctttaacagaaaagttattttttttagtttcaaaccttttttgtttcaaacgacggataagatccctcgactcacccaatttgctttcttcttcataaagaatatcataaacttctggttctaaatcattatctgcaatttcattttcttcatccttttcggccaataactgttgctgttggagtgttatttcttgttcaacagcattttcctcaataatgccaatctcattttgaaaatcgttccactcttcttcaattagttctttatttttagcaatagattcatcaaaaaagttttctggaagtgcggacaccgctcgtgtatccttaggaggttctgtagattgcttttcattaaaatcacttactgccagctcacgagattgatcacgacctaaattttcaaatgatttatgatctctcgtcttctgacgcttcagttcttgactagaggctttcagacctcgcttttgccctaatcgctcttgttttactttcctcagtaactctcgtgcactactcatatttttgaagctccttttctaacaatattcacatttaatcgtaaaatattgcattcgaactataaaatagcatgtatccttagttttcgcagattttgcacctttgctataacaaactacaacactgctgccacttgccaataacccatacctgccaacaccttgttttttagaactcttgacgagcttttgtgaggatattaaacacttcaggaacgacttttgtttagttatgcatatattttaatctcctcagtttatttagtacgcattcaatcacttgttattcgaattgcatgtattaaccttgaagtacagatgtcattgatcaaaatactttttattcccataataacgaagcatggtaagaaaaagcactagaaggacggcaaaagcctcagaaaaacctcctgaaactgttgttcggtgtgtttgtaaatcgcaagaagacattggcgatacgtgggttcaatgtgatgggtgtgattgctggcaacatgccagttgcgttggattagcggataaggatatacctgaaagctactattgtgaagtttgtcattcgcgaagcgacgtttcatcacaagtacaaaattctcccaataaggatgaagagcatcagacagctgatttacttgcctctaatgaagggaacgagaaaaacaatgaagaaaataatgttgtatcttctgattcaaaagaggcgattactaaagagtcaggcgctgaactagaatcatccgagcctgcttcgacaaattctaatgttggaatgactactaggtctggtcgacaatctcctaggactcctattggctccacgacaccaaaaagttctcattctccaccttcaactcgaaaacgaagaggcagtgttggtacgacggctactcataccaaacgtagcaagaatgcaccaaaaacatctcctaaggatgcttccaatgaaactgcagatcaggaaaaggagcttagtttacacacttctatcgatgaaattcaaaaccctgttagaaaaagtgttgccaaagcctgggtttccgtttttgaaaaaatcattgagaaagcaaaacttgaaggtgtgcaaggattagaagaccttaattctacatccttagcgcttcagcttgagcatattatgtttatggtgctttcgtatacaactgatcattcgttaactccgaacaacaaatatcgagagaagtttcgtgctttacgattcaacttggttgatgacaaaaacccggcatttcgagcgcgcgtgttaaaaaatgaaattagttttaacgatctggtcaacttatccagtgaagaaatggctaatcctgacttgaagaacctagctgaggaaattcgtcaacaaagtactgaaaacacagtcataaagcaacatttgattgctccacgagatcgtttacttgatgaagataaacttacacaacaagatgaacttggtattgcggaaaacgatgatgcgatgtttcccaaacctcctggagagcttgtagctccaatttcaattgcagaagaagagcccacaattgattccaaaagtcctactttaccggaacataatcctctttctgaagacgatacatctaatggtgataaagctgcaaaaagaaaagggagttttaacgacacaaaaccgatagtcaatgtcccttccatcgtggaaatagatgatcctactatacttgacattgtagaagaggagcctcttgcgaggaacgattcattttcttctccgtattcgcctgctgaagatatggctgaggagtctgagttttttggcatgaaagagaaaatatggactggaaaagtaaaaatggctactgtttcagagtttcacgcaaatgccttaaatttatttggtgatgttagtgctagtcatttatttgaaattttatctgcgacagctttaattgagggtcgtataagtgtatcatcagttttgcagtattttcatgctctaagaaaaactccttctaaagaaataattgcggtgctattcgtacccactgagcaaaactcacaaggatttgatattttgtacgattattttgtgaaaagaaatcgctatggagtgttacattcgaagtctaattctgtgaaagatgcatacattattcctatgccatcaggaaacagcgtgcctgaattacttgaccttcttcccaaggttgatttacctaaagatcgaaattttcagtatttcatgggcttatttgttcttaataaaagctcctctcgtcatgaatcagtagaaagagccactcctatcactacttccacaaatggtattccatctacatatcagtctgcttctggtacacctactaatccagttcattcctacccgtctctcgaaagtattattaatgctttaactccttctgatatgctcttaattaaagatgttgttgagaacaatccacaaataagggcaaatccgtcgctagcaattaaccctcaatttatgcagaatgccatttcggcggctcagaaaaaggcgtccaaacaataatttttgtaaatttcttttttaatggaggttattaacaagcaccgttcttgcataactcctcctttttggatcatcaaaaatggcatatatgtctctttttggtatatattaaaataggaaaactgtagtttaaagaatcaattaacccggtccttaaaagttttcattataatatcatttttgggagatggtcctagttaaccttatcctagaatctttgagacacattgacgagttttttattaacggtatattttgtgaagcatggcttctttgacttacatatctatctaatattactgcttgatatgcataatctattttcataacattttagttatggataattaaggtcaacctaatgatatttatttattttttttttacactcttaattgagtttgttagttagcacaatgtaaagcgattcacatctggacttaaaattttgatttgatattataatacttttcatatccaccctaaaatttggagaataaaaggttaaagcatttagtaactacctatcgtgatatgattataattttaaattcaacatgaattagtgcttatgtttattaaatgatcaaactattaatcgactaactcatcaataccctaaaaatttggaggataaataacacccaacttcttcgtttagtgaaatatttaacaaaaaagcagttatccaattcatccggttgtattaaagtaagggattactctttaacaaacaacattcataaactaagtaaacgttaaaacctttcttttttttaaatctcacttctcacaaaagcgcaaatttagcccaggcgaataacaccgctggcaatcagcttctcaattttgcttttaacggttgggttcttcatgtgttccatcaaagcagcaggattctcacgagcttgtccaaggatagcttgcatagcagggtcttgtaagattcctagaacttcaggatctttttgaattcgagccatcgtctcctcctcagtttcattttgtctctgactagccattgcgctcatacacttggacaattgagactcgatttcacgaaggttcttaccggtattgggctcacgacggtcaacttcagaagcttcattgcatgcatcaatacatttattgtaatctttcaacataaaaagagcttgagctttgcgaacatacgcttttgcaaagttgggatctaactcgattgccttgttgcaatcacgaatgcactctgcgggagccatcaccttcagataggcagcagcacggttaccaaagccacgaggatcagaaggagcacgcttggtcatttctgtatactccttaatggcattggcaaagtcgccagatttaaaaagctcattacctttgacacgagactcctcggctttgtcagggtcaatgtaagcttcacgatcctgaagttccttactcttttcagcatcctttagcctagagagaatgtcaggagtacgatgttcggtaagagaacgttgatagtaatcaatagctttgactaaatcaccgcgtttctgatacgtagtacccaaacggccaagtgctttggcaatgagcttaaagtcggcacgcaactcacgaccttgctcgattgcatcttcacaagttttaatgcaatcatcaagttgatccgcttcaaaataagcagcagcaaggttattcaaataggtgatatccttgtatgtatcccatgcctttttgtattgttcaatagccacaggaaagttacgcttcttgtagttttcattgccaatttgcttttcttgatcggcttttttcttaagggcttcctttgtggctgcttcctccaattcctcagcagttttgtcttcttccatgggttcactggcttgaggctggggaggaggattagtggtttcaggcttggcagagtcagcagaaggcgtggaagaagaaggagcaaactcttctttcttctcttgttcctctgcagcgccctctcccgcattcatgttgatatcaatacccatcaacatgccaatcaccttcatcatccttgggtcattcaactcggccatgatactgccaggattttgttgaatcttttggagcttagccataaaggccgaatcagcaagcaaagaagccgtttccggattgctagcaagcttttccatgaatttaggatcggaaagttgagaacctaacttggcgaacgggttgaaaccgccggcaccagaagcggcttgagtttgtgcggcttctacacttttcaaaccatttagcaattgcgcattattagcatcatgcttcaagccttcctcatatgcgctacgtgctgcatcaaggtcgccaagtccgtgtaaagcagcgccttttcttgaccaacctttagcccagtctggcttcaattcggtacattttgtggcatctttcagtgcatcggcatagtccttttcagaagcataacacgcagagcggttggaatacaaaatgtgatttctttcatctaaaccaattgcttgagtaaagtaatcaatggctgttttataatcctttttggagaacgccgcatttcccttggctttcaattcttctgccattttaatgaattcactgaaatcaccagttttcgagtttcgtttgctttcaaaacgatttcccactaattaaatatcaacaatatcgattttccgcaactaagcgtcgtaactctttccgtttactactttttcgtagaatttggaatttcgtttgtctttgaagatgtatgctaaagacaggtaattgtaaatatacccgacaccgctggacacgcttgtgtatatatatggccatcgtcattcaagctcagcgaaggttaacgaaaactccagaataacgaagattcttttgtttaaacttacacgcaaattcatgatataaaattagataattctaaaatagttaattgtatttttaaactactttaataacttcaaaattgctttcccttctgattttgtaaggatttcgtcttgaggtcacaactcttccatcctccttggaaggtgacagtttgtttgaatttgtatatctgtaaaacactgttattcatgaaaaatagtagatgatattatttgtattcttttttcattgcagtataacataattctctttgtaggataaaaaacgatggctcaagttcttctacgaagtctttatactttctggtgcaggctgcttcatctgaatacacagtcaaaacgtcagtagaaagtgacttaaaaacaataccaagaggaattacttactcctttttccggacttttcttttagtccacatttttatcgtttggcactttaactcgtttcatctgcgttgagtaaaccactatgaatatcacaagatccaagtaactaacctagtcagttctacgatatcaagttctttgaagaaagcataaagcaagcatttgttaaataaaaatttaccattattgaataacgctcatcctgagcgttacccaaaccggtaggatgaattatggaaacacatttttgacgcttttgcttctctactagagtaatacactaacaaataaaaccactttacatttctattaacatcggttcacactaccaaaacaaggtaggaagtaacggagagtaaagaaagattgatatataagaataggttaatagtgtataaagaactaaatcccaattaaggaaaaatatggtaaataacaacgttgcaatttatctctcttcatcagggatggacttaactcactggatgagagacatgtccatattaacattctaaattcagaaaatcctcagctaaaagaaaaaagcattcttcattcacgactccaaagacagaaaatcaatataaaaaacaacaaacgtatcaaatataaaccacttaatcataaaaatccattagaacgaagtatttccttctcattataaagctggatcctgttcttcatgtaactttgatagagtattagggtcagggagttgagcgtcatgatattcatcaaccgatccgttgtcactccgatatgttacaaaacttgcagtactctggggtcgtcgcctacgcgcaggcgctggcatgtgttctgcaaatccctttgtactatcgccgcttgcatcacgtgaatgtttatggatggagctatcttccggctttgtgttttcagaaagaaacttgtgaaacgcaatcctgtcaacctcactgaaaattgggataaactcatccaacgcacacaaaacttcaaggtctgacttgccattagggatgtcaaagttcagaatgtactcttcaggtgcaatcattttaaagtatttgggcttccattgaacattctctatctcgcgctgttttgcttcttctcgctgacgatcctctatggcggattttgtttcggtagcagtagtttggtcacgggctattactgcctgacacgttttataccacaacctttgagactcacgctccccctgctcctctaatggacgagcagaaacaagataaacatcgtgcttcgaaacgtccagcaatggtcgggtctcgcctgttttgacgctttccacactcatttctgagtcccactttcctgaaattttgtatagcacttctccagtactgacacgcttgactttaccagcaatcgagttgtatgtaccgctaataaaacctttgaccttgaactcaatgtcggcctgtagatcggttttgggacagcggacggtgacatgatcacccagttcgagtcgcatctttccaaaaaggataccacgcgcatacacgttgggctgggtaatcaagtactcttcatccaagtcttgtaatttgatactggcaataccttccataatactggccgccgagtttccaagaaaacgagaacgaggctttaccacaccatcgatccgcaccttgtactctgggcataggtaaaagtatgcgctaattggtggatggtgacagacctgttcggctgcatacactgcgataccgtgcaacttttgcaaattaggatcctttgagttggaaggagggaacttccaaaatcctgtaaacgtttcacccaaaatgggatttaacggttttttcacaccccgagggcggatatgccaaccggacatgtagaaacgaactacgtccaagaaacgcatttcgggatctgcagttttttgaacatttaagagcaaatctggatgactcataaaactagaattttcaagaggttagtacaacatccttttacattcaaaaatcttttttttgcttattatctttgttttctcttttcatttccttaaacaacactgttttcatacatgcaaataagctacttgctcatgcatttccgggaatcggtcaatttgagtgcatttcaccagatgcacccttccggctggcggagatgtataacaaatcgtccacatatgcattgcgcaattgcccatgaaatcgaccgtaaaccggaattttataatgaccaggctgtgtctttgacggaatttgaatacaaagaaaataaggagactagcaatgtacatactttgtgatacgttccaacatagacttaggttccaacacaaacgtcggaaatgtgactttggacaagtccatattaggtctgcgaacatgtggtcaataacccgcccgtcaatcacgcaaaggttgtcatagaagactttgaatttcttcacatctacttcaacgtcacatacctcagttgggagacgattcccaaaattatgttctaaataaaaattcgttaagatcaatcattccaacaaaattaaacttcatatcaaagttgtcgcatctccattagccattgtagtgtttgtcaccaactcaaaaaggccttttctatctgtacctacctttccttcatcttcaatttcctcagcatctctatcttgtttctcgtctacacatacttcgttagcaatttcccatttcctcatcttttttcgtcttcaattcacggttttctacggtaacgcttccgacgcgcttctttttcgacatacgaggcatattttacgataatctcagtaactttcttgaaaatactaccaaacaacctgaaatatttgagattttttagatatgtacgttgggttagttgttggttcagtcaggcagtgtctaaagtccaaatttgtggtagtaagtacttccaggtctaaatgacgtcagtcatctcagaaagctgaaagtgatgctgtattagcaaaataaatgtaaacaaaaccatctaaacgttgaaattaatgcaatactcattaatatttcatgataaattgtaatttttagttaatttaccaatttgcttctttctatagtgatttttgttaaattgagagatttagatttttacgattgctattatgttccttaatggatatgcataagaaagtatatggaggattataaagtattgagtgttaatagaaagatttgtatttaggaagaaaaggaagggatagaccaaaggggataggtacactacactgggttgtaattttaaggaaaactcttccaacttggttaatatcccaatgtttaaaaatgtttagtcaaacaaaagaagataatttaaacaataacattctcagatttcgataacgcaagcttccattttttacgattcaacgagttttgggttttcaactttacgatcagaatgctgtgtcaagctaagttttaaatcgttcaacaaatcctttaccagattttgattggtatattacagaatcataatgaagggacatttttgaatctcctatgaaaaataccctcttttcaagctcatacgaaatcggttttcttaatgccatactatttaaaatttcttacattaattgacatttgtccctcgtattattattttatactcatcctgaaaattttacatccagaaaaacatttcacttaaagacagtacaacttttcgtacgactttattgtttgtatgtggtatgtggaaaaagtcaataccaaaaattagtacttatcttcaaaagaatttcacaactcatgtaataaaaatacaagagatatatatgttttccgtaaatccgcaacaggaagcttatacatgaacgtttgtcaaaaaatttcaattacagtaggaaggaagaaatatatatatatattggttataatccatctccattcttgctaggcaaatttatccaatcctgtcccgtaaaagtttgtaaatgaaatatagaccgaaaggatttcgattcgatattgttgaattccaaaattaattaaatccaaaataatttacataaaaaccaagagaagaagcccctgtatcccatagaaaaatttatatacacataaactctgttaaaacttattcgtctccttgctaagttggtgatccgttagtaaaccttccctagatcaaaaaaaatcgaaaattaataaaaaccttcataccttacgagccttcaacttttcctgcttttgcagcgatttactaattttggtatccaacctttcctctctcgcctgagccttcaaagcagcggccagtttatccttagccttttttgaagtctgctttttgtttttcttctttttacttatgccgttgctctctgatcctccagatcttaaagctatgttagcaatttcttttgcaactttctccttcacagaaagctttgtttcattctcaattgccgtagaactatctaaatcgtaagcagggtccgatctccgaaaatttctactacgaattgactgttttttagccattcttagttgattgtttgagtaattgctctggtagagtttatcgctgcattctacgttttagccttcatataacgtaactaaaaaacatttcagaatcgtaaaaatttttattggaaatatttatttcttttaaagaaagaaagataaataaaattacttagcattttattcttaaaatgtacgtacaattttcaggttccaatagtatgagctggtaagctgacgcaaagattttgtaggtcaaggttttaagcgtgaatgtatagaaggaaataatatcggcccagcattcttgcaaatgatacttacagtttctcaagggatcgtattaaccatgaaacgtatattcaaatgcatttcgtttcactaattgccaagaggtacgaattaattagaaagaaaacactcatgaaaataaattaactatatcgctcattgaaaggcagaccatccacaaaacataagtgcgagatatgagggatcttgagcaattcgaatcaattctcccacagaagcttctactgaaagagtacttgataatttctgtcttactttaagtatagctctttcggcttccgattctcccgatacattattcctttgtatcttggggtctctagaagcatccgttgtaatattcccgctctctggttgattaaagttttcaagttgcatcttttgttttttcatccttctcaaaggtgaaataagccaagaaaataatggatcatatcttaaaacttccaggacagacagtagtgaatcctcttcccgtcgaagtgtttctaatgtaaactccatgcatcttcgaaataccccttcaaccccggtaattcccataccatctacaacgtctcttgtaagtcgaaagggaacacattcaggaacgggtagttttttaccttgttcgaaagcaattcctagatcaatgtgaatcacttctccactcgttttgtctattaaaatattttgcccatgtctatctccaagtcccaaaacatgtcccaggacagaagcaacagcagtgcttcgtgcgtaatttgtttgcgttgtaaaccattgcactggatcagcgtaactctcgaggaaaaaatggcgaaagacaggacgataatgtctacaaactaaatcgtaaactttcaatctagtttccaaatcctccatttgtttctcagctattaattttcgacaagtactcaaagaccattccttaggatggtaaaccttgtgagccgaatccagatactcacccaagggaatggtatcttgaacccactctatgacacctgtctttaatgctaatggaatcaccttataagtacgcattgacagatttctttgactggtttttcgatagctcctgagaaatccgtttacttgctcaaacacctgttccataacagcatcttgacgaagatcatcattcccccctttaaccaactgtttatatgtgtgaccatttgagcccaaacatgtaataacttttggcgcattaatccctgaggcaaaatgaatggtatcatcgaatgaagaaacggtagggatgtttgaataatcacctgtatcatttacctttacgttcattgttataggaggtaatccatagtttgctgcatcttttagaaaccatttatatccaggaaatcgactaaaagatgtactgtcaactttgctcctgggattccactctgctaaacttacatagttttcaaaggagcacaaaagtttggtgactaaattggataatccttgattaacttttaacagatcaaggatttttttaactgctctataccgtgatccagcatcgagattttcaatttctggaacattggacacaagcgaaaacaaaacatgcaaagagtgataaggatgattacgtccaacgttgtagcatatagatgtcaacgattgttgaaatttcgagttctcgttcatcaaacgagctgccaattgataaaagacaggtataaactttttacaaggcaagttttgtaaatagtgctgtaaggaattgttcagttcatctaaatgtgaatttgaaagccacatagtacagcatctagatatcaaaacatcgttttcgtcactttcacttaaacatttcaaataatgagttatactttgagtgagcattttactcctaaaagttgacattcttaaatattcgcgttcatcaatgataaatgaagacatttccctagaatgatggttttttagcattttttcttccttcatattagaagcatttacaatggaacgctctaactgttggatatcattctttttctcaaaataaagcttttccatacgcttgaaatcttcagtcagatccgggctagaataattattgtcgcaaaattgagcaaacatacaataaattttagctttttctttggcgttcaagtgtgacatatgggaaagggatttctcaaaataattttttgagactaattcagtcttttcggattttgttgtatacaaccagtttccaagatatgcatagctaatagatggaaaaatggacgaatttgtttttgaaagtgattcggagagcatgccaatggcatcaatcttttcatcacgttgccataagattttagatgaaagaaaatctatatcgtgcttaaggttttcatctgccaaatcaaactttcgataaagagcatcacttaacatagccacggaaaatgcattttgaaggttgtcaactattaaaaaagactcgctaatctttaagagttccaagatatagtacttgcgaaatgaggctagatcgtcagacaagtccagttgtttgtgtgactgtagcaaggaaagtaggacgtttctaatttcaagtaataactgaaaacattcatgtaactgtgatgacatttgcttattctccttaagcaattgaaggatatcacaattaaactgagactgattgcatcgtattaaaaacttcaaatcataagccaaagcataaaatagtagactatcgggttcctcgttgggattaattagtaataattttttgttaatgtattcttcgaggtgcaaataattaccgtaaatagcgtagttatgcactgcatgtaatacctcaaaaaccaaacaatccttagtagtcttattgtccaaagaaagtggagggatatcccatttttgcatccgccaagcagaagcatacacttcgttgctgcattcatcaatagcatcattggctttgagtgaatcgatgtaaaattcattcaagctaaagaatccagcgttattaagagtatttgaaaacatcatcttagtcccctcatcttcattgcttcgatacatatttgcagcatcgaggtacgaaatggctaatgggctccgcttttcatgcaccgccttgagcaaaatatttttgaagctagtttcgcgttttattccgtaataagcatccggacaaggcagttgggaaagaatgtccgataaaagggtgatgtccaattcatctgtttttgtattatgtattgtcaagaaaagtagactctgttcatacaaatggcaatcataagcagttgatgctgcaacactgtaattaatgggaacccagtagtttgcttcaaatggattaagagcatgatgccctaattgccgacgaaggtataataaaatattcatgcaagtctttcgaatactatttgtatttttatttaacaaaccagataagatcagttgtgttacatactccttttgctttttgttgttaccattaaaatcaaactccaacagaatcaaatgtataatatattgaataattgaagttgaaaaccccaccatgtaagtactcagcaattttagagaatgtgttgttgatgattttcccatcatatttaataatttcagcgtctcttccttagtccaatttgacaaagaatcaaaatttgtgggttgtaattttacccattgaaaagaaccttcctcagaaacaagagtcttgaaatcactatcgtagatgatactatcttttggaaaatttaaaaattttctaagctcttggtgattaccattttcaaagaacatcctaatgcaatcctcaatgaatgaatctaataaaatgtcatatttaaataaaagagaacatgctttttgacatatcaatttccaaataataagttttgattcttcataagttttagtatcgcataatcgaggatcggttttgggtatataatgattgagatcagcaatttccggagatttgaaaaaattccagcccatgatgtctgaaaaaaagagcttcaaagagtcaggaaattcagtaatatcgtatgctttgtaacatttccaaatttcaaggcttaaggagtgtaaaacatttctgggacaagcatcgaggacttgccaaaagtagagacaaagataattattcattgcgattctcttaagaaagtgacctctttcgaacagtttatttgaaacctctatccattcatttttggttgtcatcactgaacgtacaaagtttatttgacagcgtaaaaatccataaccttcatactcaaaatttagtaaagcagtaacgtaaccatcaaaccaagtataaaaatcttggatagcctccatcttcgtaccaatagtgttgtagcaaaaacccaaaaagtccatacagaattcggctagttgaaagaaataatcaaaatcagtaggtttgaattttttcaaatgaaagcgcgcaattcctaatcctagtgattgggtacaaggtattgagagtaattgtctagctatcctaagtactatcattaccaaatagtttgaagtgataaaaggatcagagaaacatagaaaagcacacaatctaaaagaaatagtaacttgaagttcttcatccgtcgcaaagtgtagttgtattgcaagtctccttaaaactaaatcaatgactgaagggatagaggagaagccctctaattcttggaagagtctattgcaataccataacacagattttgtagaaaagaatggtatcgctgtgctattgttaaaagagacgcgattggcaaaaattgttaattgtgagtacaccttaaacgaagttgagcttatagatttaaaagtagagcctaattctttaacctctttaagcatctctaagcagaacaaaaaagctttggagcggttgagtaattccacatcaagtgcttcatcaatagaattaaatctcaacgaatactttttattctctacttcacttagatgagtataagttgttataacagggatcaattgcgtatacttttcagaaaaatcaacagacatgcgtgaagtaatgagtttagccaaggttatattcttagtcagaataagaacaagtataatttcgtcgctgttttcttttaaaaaatcggaaaggctgaaataaattggtttgtaggggaattctagaaagtcattggttgtattagaaagatctttgctgacgaatgaccaaaatatctctaacctgtatattcgaaacagttgcttaatatttgcactctgaatgtgaagcttacgaagcaaaggttcaaaaatagttgacgtttcatagctgtttgcaagcttaagcagctgatacaacaatgctgatcgattggaacttattgacaaaaaaacctttaaagtcaaatataaatagcagaagcctttatacaatgacttctcaattttaatgcttaaaattgggagaacaaaaccttcaattaacgttttatcacattttttaagaaaaatcaccaaatcgtcaacaaagttataaataacacaaacatcagagtctttaagagttaaagaaatcaatttttgataatcgaattttgaataaacgtgagatgtaggggataactgaaatataaattttaaaaaagtttgtctaccagataatgatgaaaatttagtctcaataaaaaccttttcaatgaattttgtaatcttcacaataagtttcaaagttgcgtccgtgaactgaagtttagaatgaacacatttttgaaatattttaataaaaatcattagatagacttcgtctctttcataatcataattcattaaaattttttgagccagtatttcaagacatttgtagaaaataggttcggatgtccgcgcaacatctaggaaatatgcaccaattgcagacataccaaaacaaaaagtttcaatgggatacaaatgaagaatattaattaagctgtcatgaggatgactagaaaagtagtcgatatatttttgtaaaataaaaagatcagtattccgtatttgctcaagcgatccttccatcaaaccaagtatttgatgattcctgattaaattttctggccgataaatatcttcttcctcctgggagaaatactcatcgtgatcaaattcttgaggctttatgaatacgtttttagaagccatatccattatataaagaaccaaggttttgagcggattactgtctcgaaaatgagttgaacgaattaagtcgcttccaatttcataccgaagatgttttggctcatcagaaatagtaaactgcaaattagtagagatgcaatttattattgggtcataactgtgattagacttaacgaaagaaaggacttcagggaataaatttttaaaaatgacaagattgttaggagtaacattatgaataccttttttctggataaaacaatttagaaagccacataaaaatgatatctgagaaaatatcataactgcttcgaagcttggggtttccttgtcaagctcatctttgtcataagatgctgagctaatttcgtctatcgagctctccaacattttaatgacattttgcaaactatcacagtcaatagtatggttactattgaaaggatagcatccttctgtagactgtttacatatttcgtcagtagtataaggaaaacgaagcgtaacaggcgaccatgcttctttgaggtgaaacaaattacgttcgaaaggtgatcgtatttctgtggtgatataagataatgacaacggtctatagaagatcatcattaacaaatcaaaaatgataatagaagaatcggtaaatgagaaaaatggtagttcaccctctttgctgaacaaatgatatagatgccacttcaaccattttagaaacacagatttaaaagagctttgaccaacaaataggttttcattaagtaatatgtacagagatttccagtaatcaatggcttcatatgaaagcattggcgagtaatcattaaataaaataaactgttgctttatgaaaggaaaaatgctcgcgaagcacaaaggccgatacatgttaaaataagttaaaatttgatagcatacaggagacgtaacagaattcaggagaccacgagaagcagcagccaaaatttcctttttacatgaagtcgtaagcatcgaagagtaagctttgttgtaacaaatgttgaacaatataaaaaaagaccagctttgaagttcattttttttctcagtaaagttaagactcattttttgaattgacaatagatcatcgtttgttagattgtcagaaatagcagtgataattaccatgagttgcaatgaaaaagaggaagccgagatattggctagctcagcttgcaaaagcagttcctctatttgagaacatgttttctgctttttgttggcttgctccgtgcttgctaaggacaacacggtttttttgaggagaattagttttgcaagaaaaaaataaataaagtaagattcaaagaaagaattatgtctaagagaaaaaaaaaggtgtagccgtggatcgtaaagttttgcaatgttgttcttaggctcaactgtatggaatctaaaattcgcaagcgataatgaggagcgttttccaaaaaaatttaagaaattttttaaagaaaaaaacgaagagttaagaagatctaaattaaaagatctaatggaacgatggggatcccatgtttctgaattggaccaaagtggataagaaatggctaagcattgtataagctgcaatcttaaatccagacgcttccatttatcagagtttataagaatcttaaagactaataaaacaacgcttgcggaataatcattacaattggggatcgcatatgcacataactgaaacaaacactgcaaagctggtagatgcgcatctgtttcttccgtgtaagcataaaaaaagaactcaaaaaatttcagcagttgctcactaacaaaattaattggagccgcataccattgaacaagagaacgcataacgtaaatgagctcaacgacttcttgctttactcttataacatcgtgcgatttccagatagatatttcttgatagtttttttggcttattggctcttcttcactatcactaacataagtttcttcagctatacttagtttttcaatagcttgacaacaataggaaactagtgattgccaatccgagaaacgaagatgatgcaaatgaggagaatgggataatagtagccgaagagccttagaaaaattcaaacagactacctcacatatagaaccattagctgtgaaagtatgtcttagaattatatctagaagcgctaaaatatgaggctccctaaataataaaatataagattcaacacatgttcttaacaaatagctaatatcttgaagcttctgctcttgggaagctttggaaatttgacgtttaccatgattagcagaaatttgccattcaagttcgaatgctcgctttatggccttttcgattattaaagcatcttcctgatttagcgaatttccatttctggagtaaattatgtagctgcgaagattttgtagagcatctgatcgtgttttgatttttgatgaagacaacttattaacgatgtcatttagagaagtcatagtattacatcgagtaaaagttatcttttcttcattaatatattaacatatttggcgtaaactgataattgagtaaaaggttacgcgtctccaacttttggaatttggaaggttcatttagcgtgtacgaattttacagatgccaagttataaattgaagtgtggtaattcttcttattgaaactaaaaagcacgaaactatcaactatataagaaaaaaggaattaaaacaaatgatcttctttggaaatatcaatgactctactgttagctaaatatgtacagtaatagtggattttcttttttcagcaccgaattattcaaaagccctctattaaaagttttcaaggctgtaaaaaaagaaatcatagaactagctcaattgcgaataaagtataagagaaaagagtgaagaggtttcgagagcttaagaaaaactattctatgctatccgcggtgataaacgaaacagcgtcgctaaatgaagccgtagaaacatctcgtgcatgcgaaaaagctggtgtttctgaaacaccggaaccagatttgggaagaagatcattctcggcatcgagcccagcatcagctttggtggattgagcaacaggaatagagtcctccttttttgtaacaacaggcgtcgattcctcatcttcaacgatagaaacaggcccctcatctttgacaacgggcttaggattctcaactcgtcttttttgaggagagagctcatcagcactattggttaaagtctttggctgtctatcagtatttacagttggagtaacagttggagaagatgaacgatttgtcaatgaaggacgtacatactgttgcattaattcaacatattcctctccacccttcaaatcccattcgcttgtacctattttagatcccatcttcctccatttttccaagatgccaagacgacgtgacttgcacaattccaccaactggggccagtacttctcatgatgatattcaaaatgaagagatccaccaaaattcgaatctaattgatccttagggacataacgatccaacggttcattgaactttaacttctctcgtgtaatagggtcaataaatggagatatcaatttaaaaaaaccccatacagcccaaggaatattaataacaagtgctcttccaagacgctcacaataatgagtttgcaaaatattcagtacctctttaccttgaccaacgctgggatttgaacgattggacgaagacttgaaattaatcaacaaagccaatgtctctactcctggaggcataagatcaatagcacactccaatgaaaaaaccagatgccgaatctgcagtggtgaggttttagtgttttgcctagctggatataggtataaacagggacgaccgtccttgtcgtaacctagcaatacttgcttaccagttgcattctcctcttggatttcatcaggatccatattattaacaccgaagtgacgacgccataccaaagtatcaacaatacgcttttttgcattggaaacgtgccatttagtagcacgcaaatatctaaggatgcattcgcgtgttagccaaagacgctccaactcaatcaaatccgttttcttgctagaattagacgctacaggaatctcttttaattccaaacaatatttaagtacttcttcatacatttcttcttgttcagaagtcaaattccgataagtgggagccataggacaatttgcatcaggataaggaattggtgcattccaagtaccatcaggatctaattccttagggaactcaaaagatgctttagacttcaaggcaggactgttctcatttgctttaattggcgatgctaccgttgacttagtagagataatagtagatttattaggaatgtcaaatgatgcagctttttcttgaagctttggagcagctttagcagatgctgctggtaataccttattaggagtagagggcgctgtactgctgcgtccaccttggaatttgggagccaccttgggactcatcgctggcaacactttactaggggtggaaggggctgtaacgctattgccaccctggagcttcgggttcattttaggaactgtacttggtggcacttttctaggagtagaaggtcgtgtgtcagatatactttcgctatgcggttccggatttactttaggactagtggtagttggcaacggctttctcggagtagatgattgtgtctgagagttttctaccaaggatgctttactggaattatcttgacttgagggatgatctgagccggattctggaattttgttatcagtgctcaacaagcttggggggctattttgcaccaccttctgtttatagaattggctaggaacgatagtgtcatacgaagagacagattgtctttggcgctgcattgtcccaacgattccttcaatgtctccttcagaagaatggaactgaaaatgcctttcatcagtgagaggggcattggaggcatgttcagttttcatcgcatcctcagtcacggctttttcatctgaaataaaacgactagagtcgacgtcagtttctttagcggcttcatttaccgaagcatcgcctaaagaggtatctcttccgtcacgttccaaatcaccaacaacaacttcaacgtctccgcgaagtgaatgaaacttgtaatgctctgtgtttgtaagcgaaattttggtattttcatcacaaacagctttttcagattttgcagggacattagcagatacaggatgctcagtaggttgtttttcatcagaaaccgtctcactgctatatgctactgcatccggtgattttagcggattattcgcaatatttggattaactttctcaactcttttttcagattccgtagtagaattaatctgatcgacattaagtttgctatcagatttagcagcagcttcatcgacatttattttatcattcatatctacattaagtctgggtgtatctgaatcatcgggtgtaatttttggttcagcggcagaattaccttcggaaacatctaccgttggagctgaactactcatggctgcatcattagcttcagctttatcagattggaccctgcgttgagcgacctttctttcaccttcagcattacgagttttttggttagctgcttgaatatgctgcaagttgactgtatttctcatctttgaggcaggagatgaagaagaccctgttttggtatgtacagtaggattaccaacaggtacagattttctgacctcgttcgaagtggaagatgtgctaacattagggcgagcaggacgcacattagaggcgggtcctttggcagcagtattttctctttcatgaatactgctggtattgcttttatgcgattttccttttgacttgccaaaaccaagtttatggagaaacttactaaagccgttgtggccatgatggtgatgttccgaatctttcatcgtggttttgtatcgataaaattaacgaatgttggttttgaataaactattaacagtttagattgcaaagggtattcttttcaccgtaaaagaagaaatatcaaaggaaattagaaataatggaattaaatgaaaaaaggtattttcccaagacttaaattactatagggttcgaaatacttaactcttttcttttttctctatttttagtaagagatctcgatggtttaccatgaattccaggatatcttttatctctgtttcgaccaatttaacatgcaagcaagttagattatattcaaagaaacgtgtctgatctctaaagataaggcgcagacagaaatgcaaagaacaaatgtcagatatatttagagtatttcaatcggagcaattccgaaacaatccaacttctgcatatgcacgttttctaacgttatttctctaacaatctcaataactgctaaacaacagttttagcaaaaaagtttgtaaaggaaaaagtaatataataattctcaaaacaaccaattttctttaggaataagcgatattcagcgtagtaccactagatatacttgcgttgctcgctttgtatatatatggtagttggattgttacaatggcagggtgactgaaggatgagcaaacgtaagaaacaccggtatgtaccgtcttcggagccgaatcgtccgcgatgagcatctcaaggatacactaaataagatagtgcgaaaaaaggagaacgttatataaaaatactcaaacaagaatcaaaaaaagtgaaataaacgatagtaaaattcatatttgtattagccaaaaggaagaatcattataaaagaaaagcttgagtttagaaatgcaataaaatatgcaaaaaccaaaagaaggaagcaagattctgcgcgtttattcttccatgtttatttgtactgtgcatgagaaatgaaagagaaatctgtgttgtatgatccataaaatgtttcttattcaaaaaaaagtgagttatacttatgactgaatagaacgagtttctggtatacctccatatctaaaggaacaggaaattagttaatcggtcaatagaatgtaggacttagcagaagcagaagttcaaaggacttccttattatttttataaacacaacttaccaatatcagtgccaaaatcaacacaggttaaaagctgcaccgaagaatctggtttgacagaaacgacaaattcatagaaatgattgggttcaagagtgttatcctaaaattagttagataaaataaaaaaactctgaaaaccgattgtaaaatagataaaacgtaccacagtgaggtgcatatcgaaagaaccgttggaatcgacttttgcagtttcaccttcaacttgattcgccttgccaacaatccgaaccgtttttccagagcattctggtagcatatctttcgtaactcgaggtgtagggcgttccatattattttatacgcgttgtttataaagtggtggaagtgaagtatgtatcagaccaggtagttaactacttgttgacacgaattatttaaaatattggaacgcagtacgttatgtattatatgttggaaggcgctgggatgtaaataaaaaagcaaaagcgtaaatataaacgctgggggctaacgttgatacattactgttctattttttataagaattattcataaaaaaatctccttgtatccttctgcgttaatttcactacttattaattggttgaaatgttgtaaataaacgggttaaagaccaatataaatacgtcttacatatagtgatttaaataacattatggaaagatttcatggtattttatactatttttgaaatcgtcggcgactcttaattttctctcttttccaataccactattagtaaattgcttaggcgtagaccagaagcttcaataattaaaagtaaatgtaattgatggaaagcagccttcttttaatgatataatttttcaattagttttaccttgaggttgtgatttcatgtatttcactttgaagtcgcccatcccctcgaccattcaattcaaaaaaaaaaaaatcaaaaaactccatactcatattgaaatctttcttctgttacattagttattaaaccactcttcatttacatttgcagagcttgttaccttaatacttgctagtacctaaaagtgctctggttcagctctctagtcgaatttaccatcaacactatttttggtgttactaattatagggtttttgcccatgaactataggcaattgtttcttcttcaaaatgttaatttagagtctaattatttattaaaacgtgtatgcctgtctttaaaattgtctccttgtaaacttacaaggaaatttcatcatgcttgcccttccagttcaaaagttttgaaatatttccgcataactggatgcctaataaatttcgggaaacaaccagcaaacgatcatcatctttggggacattgtggtgcgcgtttgaagcatactcaatcagatcttattgatcgatttaaaaatgctaatttgaaatccgtgaatgaggaaaaccttaaaaaatttttctctgaattagaaaatcatggaaacattagacagtggttgaaagacaagttcgagaaggacaaacgcgctgctgtttgtcctactactacaaaatctgaggaagagaagttggaaaatgattttgagtattcttttgatttagaagatttcagcagtgagaattttagacagtacgatcgtggagatttgctagtgttttataggggctccgaaggcattgaacttgctgcatgcactggtactaatgtttggaactatagtaatgtattgaccagcattaacgaaaacggtactattaaggaatttcgtacatctagagttttactgagatgtcctaatgtctttaaaaagctgaaagaggtgcagcaacctctttctgatgtttctgttccttctgatgtcctacctttcactataaagttattaaaaaaaatctctcaaagagcacaagatttaagtcgaagtcaccgaaatgaatttttgcgaatattgacagaattcaatattccaaataaacttgacaattcagcttctttttcagaccttttgaaatttgtgtacaaaacttcgaagcctagcccatatgctaaaatctcattgttacactttttgcttacagaaagcaaacattttttaataagcgatcacatattttccgaaattcaaaaagtctatttccttccctcttcacaaaatgattcttttgacgacgttgttgcatgcctgcgtcagaaatcaacaccatatctttcgtttataaagaaagctcgtcatttaattcaagtttcccgagataaatataagttacctataagcaccgaagaaataaaacccgtagtttattcacaggtcacttggactgaatttgaaaaaaaactattgcggtatcttgttcaggaaatgattgcaaaaagtattcaaagtttaccaaatacacacttgtgtcaggtttacaaagaagttggccttcaaactcacgagaggggattaactagtgatcagtttgctaaattcttaacggatattggcgtgtgggcttcatggcagcccccgaggttgtttcaacaggaatacagcattgctggccttggtactaatcctcagttagatgctgtgtatgaacgtgagtgtaatcactttaaaaagtttgtaaaaaatgaattaaaagattcacttgaatcgcaacgcgtcgatttaaggcatcttaaagcgttcgcctttgatagttcttctacgaaagagatagatgatgcgatttcggttgaagaattagggatgtctaattcctggcttcatatccatgttgctaatcctacgagtacagttgacattcgcagtcctttaggcacgtttgctgaaaggaactttcaaactatttatcatcccaacaaaattgtgtatatgctacctctcaatatcactcagaaatattggagtttagattcatcttctacagctcaaagagcattaacttttagtgctaaaatttcaaaaaatggcgatatacttgattacaaggttcggcctagcttcatttcctcagttatcaaatacacaccccaacaactggataaagctttgcatagtaatcgatcaattgcgaaagacatcgtttctggaccagtggatgaggaaacaaaaggagtatcaaatgatcacatgaaagatatattaagaatatatgaactttcgaaacaagcctgtttttctaggttacaaaagtttgcgtttgttattgcacaacccactccgacagttgaattgctgcctaataatgtcccttataatcttggtgatctgaatcatccagtatactggtcttccttccctacaattagtttgaacgttagtgaagggtatagcttggcagaatcagtaatatcagagtgcatgatattggctggccgggtttcatcattattttttcaagaacataaattacctgggatttttaggggccagccttatccaattatggatggtgtacgaagaaaagcgtttgaaactttgttaagtaacaggtcatcttggggactcgttgaaactaagtattcactttctgtaatgcctttatttgaaagttcacatttagcctccacacctgtttcccacttttctttggggctaaaggatggctatattcagtctacctctcctttacgccggtttaccgacttcttcactcatcatcagattcagtcggtattattaaagactccaaaaaatactatacctgatggtattcttcgtggaaaactaaatttgtacaaccaaaaagaaaaatcaattaaaactataggaagatacattaatcgtttctgggccttaaaatatatagagagacttccaaaggtacaaaaaaatatttatcatggatatttaatggtttcagaactttcaacacctcaggtcatgttggaagaattgggtgttaaagcgcatattgatattctcccggacgaagcattccggttagcaaatactcgccaggcatttacaattaaggatgtctttccggagtctaatatcctattagttgctttagcgacctaacaaacttattaaaactatttttatggatataattttacttaattaaatactcaatcctgcattttatcaatttaccgagacttaacgatataaataaattatgttttgggatttgatagtaacctgtttcgccaaaactcatctcaaaaaccaacaggtagttttactatgaagtctctttgttaaccttgactcttgtgattaaaatatattttctttttctattttttgtaagacaagaagcaaatgtctttggatgcttataaatccatcgacgaagtgtgctgcgttgtttaaaatctaagttaagaaaaatgattgaatctaaaggtgaaacagcaccctctttaaatttaaacgacgttaatgttgaagaaaatgatgctgcgcaaagttttgcagagaaggttcagcggtttcgataccagatgaaagtccatgcagcaccgcgacagaaaacgctgcattctttcctgaaaaaggataatgctaatattcatgactttactaaagttgagaaaccacacattcgttcttctaaatcgaaggtttcttataacagtattacatcaagagttaccaaatattttgaagaaaaaaataattccgttgatcaattgcattcagaaagcttgaccccattaagctttggccataccattcccaagaaaaagccgttacttatgacggcttctgtttcagaagattctagagttcgtgttagtaagagacaatttaagtccaaagttgttcatccagaaattgctatttctattgctaaaaggcataagccaaagtttcctctgtctgatgaactcatgaatgtcgaacctgggttccaccacagcaatatcggttgtcaaattacgccttacttatggatatcatcatttagaactaatgtctattacctaattggaaatgagggtgacttattgtcccaacaagtaccttcgataagtggggagttaaacatgttgagaggagtatgcacccgtatcgatgatgataatcgctatgatattgaacaagctggttcttgttttggtatgtcggtatttccaacctctgattctggagaagagtcttttaccacccttgagtccgatccgatagttaattgcgaacacgatgaaaagaaagttgctgataatctcctggttcctcaagtaatgtgttcttctaatatttcaacgttctttcgaagccctggtggaaaaaagttgtatcattatttatggaaaaattcaaatgccctacgtatttcctcaaacgaccttctcgaaatacttttaaagcacggtgtttatgtatctttggacactctgcactcgtggcttcaggaaagaaacgtaaattttgaaaagtgaaatatttatgttagactaagtatagcaaacttttggcgagctggtcccgtaatgatgatttaatgtacgttatatatctaacaagtcaagaatattatttcaataattttaaatgtatatatttatgtgataagttagaactaaaaataacgagtagatagcttgtcttaattttgaaggaccaaagcagaagggactttatgactcgagttttaaacgtctttgagaacgttactgagttcttcttgtcttatttgtttttttttatatctcaatagcgctgtatggtttataatatatgcatataaagcgctaatgttaggaccttttcttgagcagatttgtctttggaaaataacgaaatagtatattattatgttatttatttaacgagccggaaatttttcataaaatttcactaacgtgctgcgtagttaatctttattatctaatactaggacaaggaacgcgagagcatgtgtttgtcattaactacacacacgagaaatagcaatttatgtgtttcgcgtctctggcctacttatatcttacaaagcattcattttttgaaaccttcttttctttctaaataactgcatttgtaattgctcaaattaccaaccctgagcagttaaagtctttttcaaatttcgtttcatagagaatcaaaagaattcaaggttggatctatttatattaaaatttattagaatgtttgtgtttggataataatgaagcctcgcccgtactctgttttcctctttcttcatatcgttttttacagccttctttcagcagtgaatggatccccaagtttggattattttgagacttgttcaaactttgtaccgagagcaggtattcctacctttagcccatatgcagttatcaagaattttgatgaagtgaatcggatgtactacattcaagtagtggggaatttatccggagttataacgattgtgggtggaaatggctcacatattcacgctgcttcagtttattcggaaacttatgcgttaggaaaactggtcacatccaataccacaaagctttgtgatgttgttatggatcctcattcttttgaagtccccataaaatgtccttgggcagctggaagtgccgctttcatggttaaagttccctttaaatccaccttgtccgattactcaaaatacgaattgactacattaacaacgcgagtaatcgttgttgacggtactcccgagaaaaatgtaataacttgtatgaagtttggtttgtccacaactttgtattatttttatccagttatttcatatttggttgttgtgtcgctcgcatatgtctcgttttccattatttatgctctttttttaaatccatggaccggcagtttagatccatttaagtcgatttttaattttaatatggaccctgatgctcttcgtttaacatcccttggattttttgattttgtgcaatacttgcaatttgctgtttctacagctcaggttagtgttatgtttccaaaattttacataaatattatggctgctctttcttggggcactgctctatttcgatttcccattttctccgagcctgctgaatatcaatttgcagactttgccgacttgtctgtagcatcctctagttatgcggattatttgcctaagtcatatggcatgtattcgtttctcgattctataggaataggtactgcatgctggcttccgtttcttatagtcatggttatttacttatttgctgcgttatttgtagcattgttggttatttttttgaaatggcttatgtctagaattttcaatgaaactattgccgaaactcggtgggatacttggagcttcattgctggttctctgatacgtctttacttcttgacatatttccctaccgtcgcttatatgtcattccagtttgtcgcaccgcccacaggttatgaaattatccccgttttgtggtttatcttttttggaatctttattccggtgtatttatatatgaatctcgcttttgttgaaccatcgtccaaacttcttgaagatcaaacatatttgcatttatttggctctatatacaattcgtttcgagaagagagagttatgttttggatctttccaattgccgtacaatttatgcgtggtattacggttggtgtcataggaagttccggctctgcacaattagccatattctttatacttgaagttgctaatgtcgtggcgtatgcttatgtgcgaccacatttcccgcagacgagtatgaatacgttaaacaccttcatctctaccatgcgcttgatcacggttattctaatgattcccttagatcctcgattaaaggttcttggcattagtagagatttactggcctatgcaattttgtttattcacataatggtttgtatccttttcttacttctgtcaactcaacgatttatggaagtcagtgcacggttattaggtgctaaaagtgagagtaaaggtgtcccactcgatcgaccatttggttgggccagggtatttggtattaatgaattgagacgccggcgtcttaaggatccatattccaatggcaacacaatgatgtttgatcattctacctacaactcaaatgaaatgtcagtgccacttacgccagtctccgtttgttctaattcccttaagaaggatggcgaggctgctccgccaaaattattcgttcagactaactgtattcctccagttacgcaagcgtcgagtcttgtcccttctaagaacaatacagcatcttcaagtagtctaatgttggattctcctgttactcccagttctccatacagcacatcacaaggatattcattttaccgtccacctaaaccaaagtcatctgttcgtaaacgggacatggatcaactacgtgctttacaattagactttttaaacaacaagcctaatttactacgccatgatgttaattacgcggttcgtgaggccgatgtctatcatccacacgtagacacaagtattgacagtctatcgcaaatctcttcgcaaccatttgaaatgaggcccactgctattccacctcctccgaaaaatgcatttcaacgggcgtggcaaattgtccaatcaacagctaagtccatatggcactcagaccccccgaaagaatctgaaaaaggtttcgtcgttttacgttctcgtccacggccaaatttgcaaaagcctcttcctcagttgcatatagagccttcccgtgatgaacagtactccatggagagaaagaaaaccgatgactcattagcggagtcagcctggtcgattccacatccataactccactttcgttcgttaatgtttatgatttgtgagaattttgttttgttcttttattttcacttttcatttttcattgttacactttacttttgctgtttcttatttcgaaatacggaacgtattctttttttaatttatttcagtcacattttgaacctctaattgtttctttttgaaacgttttttttcgctattatgacggtaatcctattttttctcttacctgtctgctctcttactacttcatttcattaaagcttgcatttttttttcctctcccatacagtttcatttactaaaggccaaatttaataatcccaaaatctcgacttttgttgtcttaatatagcacaagtgctttctttgctctatcggcagcccattaaagtcgaaattttttttcgttcaatttcgtatattttgttgttgttgttgttccttttattttaattagcattttctattatccacctgccttttcataccaatctaatgctcgttttttccctaaatcttttttcgttaaccttttatggttcttacattttctcagttatcaagttagctaactttctttaactcacatttctttattatataaggttttttttcattaaagaagcttgcttaataattcgtttttttttgtttttcgtttttttgctgacaacttcaaatccatattactttcgcctcgctctgcttagcagaacctttgtttgaatttctactcgccttccttggcctttttttgcatacactaactaactagttggttcatttttagagatctactgcgttttgcatatagttagttaataatgttcatattttagagccattttccatcctccatcggctaataagtggtgttttccgtctacattaagtacctctctttatgaataatattcttatatcggatatttccaaacttttcgtgtacattcgatttcgatagctgttgcgatgttgcctaggtaactacgtataaaaccttggaacacggtaattgattattgataatttgtttacgtacggcgaaaaccccaccaattgatttccgccgtcataacaacccactttcttgttgtaaacaaatttgtaaataaataaaaattttacttgcgttcagcaagcatgtttttcgcaataaacctttagaatgcgacgttggaatagattgaaattttttgtagatttattaatgtcatgtatgatttaacaaacgtttatcgtccgtttggccatgctcaaagttgaaaattgtcggttgttgtttacacgtaatctaaacaaatgtcgacaggaaaggtgacgtaagtgccgctatataaaacgagcacctacttgtaacttactctctccgtatatcataacaaacattgaaattgtttgttttagaggtttaaagagaacgttttaacttcgaaaagagacagaagcactatggatttggcaccacgtcccctcggtcgtcagcacagcaagtcgcaatcggcttttgcttttgacaacaccgctaccagtattgctgccagtactatgaagaatgagctgaatcacttggctagcaccgtaaaggatcccttggctaagaaggcctttcaaaaggagatggacaactttttcagcttgttcagtcgctatcttcaggaggacgctcgtggctcggaaatcaactgggaccttgtagagtctcccaagcccgagcaagtcgtcgaatacgataccattaccgaggcgggcggcctgtctcgtgactaccttaacaagcttgccgtcctcaagcttaatggtggattgggcactacgatgggttgcgttggacccaaatccatcattgaagttcgtgatggtaacagttttctggatttgagcgttcgtcaaatcgagcatttgaatcgtaaatacaatgttaacgttcctttcgttttaatgaactctttcaacaccgatgaggccaccgccaaggtcatcaagaagtacgaggcccataagatcgacattctcacctttaatcaatcccgttatcctcgtgttcataaggagactttactacccgttcctcacactgccgactcggctattgacgagtggtatcctcctggtcatggtgatgtgtttgaggccctcactaacagcggcatcatcgacacccttattgctcagggtaaggagtatttgtttgtcagcaacattgacaacttgggtgccgttgtcgacttgaacatcttgaaccatatggttgagaccaatgccgaatatcttatggagttgaccaacaagaccaaggccgatgttaagggtggtactttgattgattatgatggtaacgttcgtcttcttgagattgctcaagttcctcctcaacacgtggaggaatttaagtctatcaagaagttcaagtacttcaacaccaataacctttggttccatcttccctctgttaagcgtgttgtcaacaatcacgagctcagcatggagatcatccccaacaagaagaccatcaaacacaaaggtgagaatatcaatatcattcaattggaaactgccgctggtgccgctatccgtcattttaagaacgcccacggtgttaacgtccctagaagacgtttcttacccgtcaaaacctgctctgacttacttctcgtcaagtctgacctctattccatcaaccatggtcaggttgagatgaatcctcgccgattcggaggtaccgctcctttagtcaaattaggcgcacacttcaagaaagttgctgatttctctgctcacattcccagcattccaaaaatccttgaacttgatcatctgaccattactggtgacgttaatattggtcgcaatgttactcttaagggtaccgtgattattgtcgctagtgatgccaaccgtattgacattcctaatggttctgtccttgagaactgtgtcattaccggtaatctcaatatcttggagcactaaatcgtcgctcttttttcatgactttttcattacatgcattagaatagcactttatggaaaccacaatgttctttttatatacagaaatgtgttgacgagatcagattgcattcatgttaaaaaatttgcattagatacataagtcgtagttgatcataaaaattttggttgagatgttgtaaatcttagtattgtgaaacgactttggttttctcttcctaatatatgatttcttctttttattgtttgctaggtcaaaaaaaaaataatatatatttatatcataatatctacatctatcatcaaaaagctaaggcgagaaaaaggctccatgtagatgtattcttttgttagtaggcaagcagcatttatgaattctattcagataagcctaagtccttttcaacttgagaagcacaaattttatgatagaaatgcttatacttttcaaacgtttcaattgcaaaagcacgatctgcctcattcaacagtctgaaaattgggcgaacaaacttcatacggccaacgctgccaacacgttctgcaatagtgttgtataatggcttatatttactcttcaatgcgagtttaaaaaaccggaaagataactctgcatttttcgattcggcaaacgagtaaacatcacccattcttttaatataattgtgaggaaaagagacagcttcataaacaacatccaaaaacaaagatttctggcccgctgaccaattttcaatatctttgctgctaaacttggagggatcatcagaatttttagcagaattagtccagctttctgcaagcttgtagcaaggatctgcaagcgttgtatcaaaatgtggtttaaccggaggcataccaggagcatggtaccaagtatcccaatcaatcgagtccaacttagatgcaagcccaagaggtgagaagtattcatacagtgcatgcttgaatttgacttcgtttacggtagactttgcaaatttcctaaagtaaaagggaaggaatggttcaaaaacagaaggaccaccaataaccctctctatttcatagaggaaattggagcccttttcgtaaggaacagtggaaaaggcatcatcgggatcccttccttcgaggttttgaatcaacttcgtatactcactatcttcacccaacaatttaaccgattcttctaattcaccccagccaataatggcttcaaattggcgagtcggctcaccataaagacggcctaaaattttgcgttccaagaaaacagtcataccttcattcaaccaaaagcattgccatgactcattagtaactaaattaccgctccaagaatgggctaattcatgagcaataacgttaacattggagcgatctccggcaataagtgtcggcgtagcaaacgtagcattagggttctccatacctccgtatgggaaggaaggcggaaggatgacaaaatcataccgtgtccagcaataaggaagtgttagttgctcggcggcttccataaagttttccatgtcatgttcaaattcgtatttgcaagctaacaagttgccaggctctgtgtatacagaagaacgtggacctatatttgtggaggccaaatcaccactgagaatgcaaaataaataactagggattggatttttttgctcaaacaggtattccaaagagccattgcagaaattagctgttccacatgggatacccgatgcgattacgggaagtttggaccggatcttaaaagtacacggaactttaacagaaggagtatcttgacagggaatgaatgaacgtgcatgaatggcttgacattccgaaaaaacataaggaaatttaccacctatcgtttgttcaggcttcaaaaactgaagtgctgtacaatccttagtagtggaatataagattgtaagtatacaggattttgaggaagggatttcatcagcgggaacgatatgcaaagctgaacccaaaaatccgcgccgcttatcaacacggaaaggagtagggatgtcattaatcgttacattcttgatttcgaggtaagaagtgtcaaggataatatgggacagggcttgggacaccctagcagattgaatcacaaaggatactttaccatggagcagctcttggtcaaagtcaattcgagcgtgccaatcgagcttactgattgagacatcatgataattagattgagtggaagggtccaaacgaagtttcatatttaaaattaattgaaggaatttaggacaatgtacaaacgaattctttaaacgaaaacaacgctcaatatattagaagcctagataaaaccaacgagtacaacgatctcagctttagcaatatgagttatgctactgagtaaataaaaatattaagtataaaatagttaaaacagattaatcacagttttataaaggaaggaataggaaaagcgatcatacagcaatacgatgagtagcaacatgtgtggatatgggtgcagcgcgttatgctactttatcgatatcattatgtatcactacatttattttcgttgagcaacgcaatttgtaaattcacaaaagaaaacagtttattgttgaataggagttttggagagagggctttgaaaagtaaataattattatttttgtgctcataaaattaccaagaatgtttgaaaggatcattgccaatgataagttattataaaagagacagcgtcccttagcttgggaatgtaaataatacaataactgttacgattattgattttggtttattttaaataaaatagtaaaaaaatgttattcatttatttgtaatttcataaggtttaggcataaacgagagagaattccacaaatcttggtcattccctctttaataagatacgtttgttaacagataacagaaagaaggcaatattacattatcatttattgtaatatgaattagttgtctatagaaagaaaaatgagcaataatagaagtattagtctttgtgatctttctatttcttcaattacgaacagagttaaaagttcgaattttgaatcgcagctcgacctccgaagggtaaccaaaaaacccaaaatcttctgatactaaaataccaaaaaaactgaacgcaacgtttttaatttgaaaattatttcaccatttccgaaatcgaagcgctttctaagtgtttcctataattccttcctttggctcacatatactgagtgcgactggtacagccttgctcaagcaaaaaccaagtctcagacttttttggagaatgcaagtagatcctgtagtatatcaactacaacgtgctgtaagtcaagatcccattgctgttaaggatgctgaagggcatttaaacaactggaaaaaggaaccaggtttctttggcaagctgtacagtatatttttggataaacaaaatgacatgagtttacgatggattgctatcattcaactacggaactccatagatataatatggaggaaaaatacaaaaatgtaagttaggagtagtctcgaagaatcaacctgtactgttagactttcgtaattgctaatgtatgattgtttggcaggtctttacttccagaagaacgtgactttatacgatgtaatgctcttttaggatctataaaatctgaaaacctcttatctattcaaaatgcgctggtcgtctctcgaattgctagattggattatcccaccgaatggccttctctttttcacgatcttttaggcaagttacagcagtcattgggtacaggagattacgatgtggctttaagattactaattactcttcatcacattatcaaagcaatggctgggaatcgtcttttgagatcgcgacagattttttacaaacttgctccagaattgcttacgattcttcaacccattttacattctagtttatcaagctggatgatgatacttgaatcttctaaggaaattaaagattctactttgttgtcttatatgcaaatatctcgatacacgcttaaggcatgtagacggttggttgtttttggtttccaaaatcctagtgaaagtgaatttagtgagcgtatgttagctttttgtgctgttcatcagcgaaaacttttgagtatgcttggtacaatgcttcaatcctcgcggtctccgatagtagttggggagtgcttagaaatggcttttgcacatgctttcttattcaataagccattctttgatttttctttctatagtccatgcttgactaagtttccagctactattgattacatttcattgcactatgattttttgggtcaaatcagttctcatctttcttcatacaaagaaaagtttgaagagagctcaaaaaattttgaaaaacttgtgattatgagcttacgagtatttatccttgtcatccaagaattctgcaatactaaatcgtcgcaccccgaaacggctcaagttctttacaactcatttctcgtagataatcgtataaacaatcttttggatttactcatcaccaaactactaatattaaaagaagaagattttgaagaatggacggattccccacaacaatgggtccttgaacaatcgacccaggatgttgagtttaacgttagggtaagttgattatgaatatgggttttttgataagcttatcattaacgataatatagccttgtgccgaaaaacttttaaaatgcttctttgatgcatatggagatattatcgtttcgccgttcaaggatatgatttacagcgtttttgagtgtccaaagacgttaacacaagcagttcaacaagacactttgatcagttctttcggagttggatatacccaattgaagagtatttttccttttgcaaaatggctacaggaagccgcagttcccaacatggcttccattaatgatattgggatatctagagtgtatcgacgaagaattgccatttttttatcgcaatggattgaagattcttcttcagaacaactccttgaggttatttacaaattgtattgctcatttctcaacttaacagatccttgcaatgacgccgtagtcattttaacaactatagatgctttcaaaaccgttttagatgattggaatttttctgagaattcatttctttctatcaaagaaaatttgtttgtccatgttctttctttgtttaaagcgtttgaatcagtcgatgctaggacttccatcttgtctttacttggtactttattggcaagggccggagaacatgttgctcccatggaaagtaccattgcttctctcctttctcaattatgggatggttggaaaaaggaaccgctgctgcgagcacgagttttggcagttatgcaccaattcgtcaatgtaagtgtttggctatatacaacagactgttttcttatactaatttctaggcgatcaaagcaaaatcttttgaattttcaacttttttatatacggtaatagaatattgtgtaaatccggaatctccagagcatgttattttcgaagcggatgcaatggaattgtggagcacctttctcatgtacatacaaaaattgccagaaacttttaccctacttatccctcatttattgtaccatctttcacaggccacgtctacccttccattcgttctaatgatagtaagcagttatcaacttttagacaataccgttttgatgaaggattactcatttaccatatttgaaaagttgaacgacttattagacgatgtaaaaaacgaaactttgcaagcactatgtaaaactgtatgtctactcattgaaactactccgatggatatgatttacgaatcattgctgaacagttcacttctgtcgaggctcctactctccattgcaacaaatgataaacaccctcaggtgttgattgaatatttattggtggtgtcacgcatctcattgcgcgagccggaattaatattgaaggtttgtcaaacgaaaaatatcaacatagctatgcttatcggcaactggattttattaaacgaccacataaaccactcgaaagatcgaaaactgaacacactcgccctcagctctctgctgcgaacaaatcatcccgacgttttggcagtgttggattctatcatgaatttatggttcagcgttttgagtgaggtggaagaggatgcgaatggagatgcaacgatttactataaaaatgatgactactcggctgttgggttttatctcgatgaaacctcagaagaaatgactcgacgaaagcaggtaagtgaatgagaggctagaaatatgtttattgtgtaaatgaaaaagttttatttgtttgcttttgttttattaatactaacttttattttagctgcttttaaaggatcccgttcatagtgttaactctcgctcattttttatttctgtatttatgttttgcagagacgctaatggtggaatggagaattttcaaaaccaatatttatcgacggtcaacccagcgttgttagaacagtttcaatccatgctataggaaaaaagaagcagtaaaaacaacatcatatttcatgataaaaaagttggtgttaatttgtatatctaaattaagccagttgctacgatttttgttatactgattaaaatcccaattcaagctaacatgatggatgggaaatttggttgaactgcggttcagaaggaacaaaacttacctttaaaaacccttctaaaaaatttcctatgcgatttctttagctgtcgcacgcttttttcacttattctaatacgactctgcctttcctatccgccaatatcgtcttagccagtatatccaaattataagtataaacatgaatacagtaataagagaactgttcattcttaggtaggcctttcttatataaacatattcaggtaaaatcaacattaactttatattcattatgactattgaagaagcgattcctcagcctgtgcaagctgtcagctatatttccaaagattggaatgataacgtaataaaacacagtgatacgaaaagaaaccatagtaaagaggaatcattgtagagaatctcagtaaagtatggaatcgctataaagagaaaattgaacagaggaaaatcgcagcaaagagatatggtagtacaaacaatccatgccttatacaaaaggtaaaggtaattcgacagtacaatgatattttttaaaaaaaacatgttctttctactacaattatttggcttgtcacttgaggcaaagacggcgaagcgtttatccatgatgataaacaagctcgccatctctatacttaagggcttgcattgtatggaaagggcgcaattgccgtgccctataagaagaacttttgatttttcaaatgaattttagatcttgaagtcaggcgacaacagccaaaacatcatctcatctcattcattcaacaatgaggaatgggcgatttttcatccagcgtttttatcaggtcaattgcgtcgatctcattgtacaccaagatgatggatatgtaatgaagccagccagtcggcttatgaaaattttgctaattataagaaatcaattgcaagtaacagaaatgagatggatcgctgcatcaacaaggataatgagatagacagataaagtttgttgaaaattttcacgacagaagaaaatcactcaactaatcaactcaaaatggaataacatggaaatttatttcgccaaacagtgcagaagccactcaaaagtgaaatgagcaatggaggggaggaaggaaagattggttgatttgctgtatcagatgaaattcatgggtgaatgaaaaagaaaaaaaggtttgcaagaggatggatgagtgagattgaaaaaatattagatctcgaataaattctttctatccatctttcatagtatacaatcgaaaacaagatagaacacatccatgccatccatacttctatctttttttttctttctctctctctctctccccccctagcattcctccaacaacctctttataaacgatatcctcttctcttcccttcctacaccaatatcctcctattttgtctctgatgtcatgctgacctccacccactttacacttttacctcgccattgcaccgtgtcgcttaccgcaaaacctcatcgagtcatggatgcgcaacgtcaccaccatcgtaagcgaatacagagttggaacgagcggctcgcatgatgccaatgacgtacgttaacgaaggacgtcaaagtaggcaaatccgccgacataaacttcttgtctttcgcataccacgattgttggacaccaacaatatatttctgtgaaaatcaattgaaaagctaatttagtaattttttggagactattggaagggtacccagtattggaaagttatatgattcttaaaaatgtacgtttgtaaatgtttgctcactcgttcgtgtgggtaatgtttgagtcggatttttgtttggattgtggatgtaaacgcggatattagaggctggagatgagtatcggaaagactttgcgtttggagagtgttgttgacgttacacttcctacctttggactgggttggggatagggatcttaggagagataagtggacgaatgaattaggacggttggacaatatcgagtcttggaagattactgaattctaataaaaaaaaaagaaaagcaagaagcgatttttttcttttgtgtttttatttcatttttattttctttccaagtctgtgactagttttttggacttttttttggattttttttttcttctacgtcaggtgctttcatacggagatttgctctttccttgatgatcagttttgatttcatctttaccttattctatatcacgtctccttccccttctgctaggcggtgattgtatgcttgacttcattctctacatcattcaggtgacgggtttcgctttcaagtcgttaagttaaatttggcggatgcgcaagtgtatcttttttttcattctttttgtgcgaaattccttttttttttcttttttttttcttttttctatcatcttgtctctctgttatcttggtttagttcaagagtacggatgcggatagatcagtgtcaagaatttggaagcaaatgtgttggcacatttccagacgtaaaaccaaacgactagagatctttaattagttatttttctaataatacccatatctcttgattgattccgtttgtcgccgtctgttcaaataatgcgttttaaagtatgtttgaattaccaaaagcataaccataaccatgcctattgattatactcccatcctttccattccatccctcttctcagtaggaaacatcaatctcaccgcacttcttttacgcatacaatgtgttttggttttgttttcttccaaccacctttatccataaacacatttcccttttactttttttttgttttttgttatgctaatttaatttatttagagtattcagcaaaatatcgaggacgagggcaaggtgaacgttcgcgaagtgaatcccgattcctatgctgaacgggaccatggctatactgctggcatattttcggatgctgaagaaaattttggcataactcagcaagtagcggactccactcaaaatcccacctcgaaacccaagtcccggcatgcacatttccacgagacggtgcacgagaatccttccgaatattcgcgctccaaatgtaaacaacctaccaacgaaaaagaatatgataaagccatcgaggctttagttgcaaaggccattgttgaggaacattccggccaacaatttcctgtatataaaggccttgaacaatacactctattacaaaagatgggcgatggtgcttttagtaatgtatacaaagctattcacaacagaacgggtgaaaaagtcgccattaaagttgtccagcgcgctcaaccaaacaccgatcctcgcgatcccagaaaaagacaaggcgttgaatcgcacaacattttaaaagaggttcaaatcatgcgtcgcgttaaacatcctaacatcattcaactcttggaattcatccaaaccccggaatactattacctggttttagagctggctgacggtggtgaattatttcatcaaatcgttcgcctcacctatttttccgaagatttgtctcgtcatgtcataactcaagttgcacatgccattcgatatctgcatgaagactgcggtgtcgttcatcgtgatatcaaacctgaaaacctgctttttgattctatcgactttgtgccctctcgggttcgtaaataccgtgccggagacgatcccgataaggtagacgagggcgagtttattcccggtgtcggcgctggcaccatcggtcgaatccgtctcgcagatttcggtctaagcaaagtggtttgggactctcacactcaaactccgtgtggcactatgggctatacagcccctgagattgtccgtgatgaaaggtattctaagggagttgatatgtgggctttgggatgcgtattgtacactattctttgtggattccccccgttttatgatgaaagcatttctttgttgacgaaaaaagtctcacgaggcgagtattcattcctttctccttggtgggatgatatttcaaagagtgcaaaggatttaatcagtcatttattaactgtcgacccggaatctcgttacgacattcatcaatttttagcccatccatggatttcgggctctcgggaacctacctttcctgccaccgatgctcctaacactgctcaacgcgaaaacccatttacctatgactttcttgagcccgaagacgttgctgctgccggttcagccgctcgtactcctggtgttaactcgttgagagaagtatttaatatttcgtatgcagcccaccgaatggaacaagagaagattaggaaacgtggtcaacgtggtaaccaaggaatcatgaattttatgggtgacatggatgatttgatggaggagaatgatgattacgatgatggtaccaagagcgttgaacattcgatgaaacgagtcaacctgtcaggtgaaaacgatcctagccttgcttcccgccaacctgctcaatcgcaacaacaatcatctcaaaggtcgcggaataagttcaaaggtttccaactcaacttgtcaaaggcaactttgtataatcgtcgacatcgacaaaaagtgtaacacagacgtctaacttcgattacttttcttttttatccaaatcagttgcttttaaatgcgattcagtaatgctgatttttcgacactactactttgttgtattcttcctgttttgaatgtttactatttatgagttatttaccttaaaatttatcttcaatctttttaaaactatccactctgttaatcaattgacgcttactcagtgacgaatatgttctaatagttgggatttattccaatactttcaatttattgttaccttaaattttctttatgatagaaccatacgaattatatgatgctcaacaactattcttaggactgagatgttcaaaaagatggaaactagttatgcattcttttaatgaaaccgttgtttaaattaaaattttcaaggggtgaaattggaatatggttattttcaactttgcatatgacatggcttcccaaaagtttcgatattgtacttatttacgtactgtgtaaccgcgatctcttgattctttttagcttgaaagaagagattgaaatattaccaggcctgtcttttaatgacaaggacgtttaatgctgttagataataccattaatgatttacgcatttttttgtcagtgtgtgccaaaaaaagccatttgctctttgtcacgttgtttttaaagaatctatcaatgactgctagtcgttttgatttgagtagatagaattttgtgcaatattcgcttgatcctgtatatattccaatagtttaggcatgaaggttctgtagtgttttgtcgatgatgttgaagtgaaattgatgataaataaatgtattaaataatgttcgttggacggcgtgtattatttggccaaaacggataggaagttgctgaccattgtttaagctattgctttttttaaacaatgtgtaggtaagttacagcgcacggataataaatatctgttgctttctcgtttctcgtaagcattatgcctataaaattcacgcatcagttgcacgatcaagaccactgttgcataattgactcgcagaatgtcgttcgatcaatattggtgagagaatcataagaacaaacatggtacagtaaactttttatgttattttttagataaacttttttaaaattcacataccttagttcacgactttacttttaaaacgaaattattaaattctttcataatgtaataatataataataattgcataaaattttcttaacgaggatttttaccgttatattataggagtccttaatgtggctttttcagcctacgaaactcatcaactagacaagaccgtgtgatattcctgctaaacagtatggcagagaccaaagagcaaactgatgatgtcgaaacattaatggcatcattggatcaacttggcatggaagcagatcccacttccaaagagttcaacaacgacgactccaaaattggtgccccatctgaagtgcaggacgaaaaagaactgctggaatttttagatcagcttgagaatgacgaagaaaagaatgagaaaaatcctatagaagaggccaacgaggaaaatgaatctgtcgcagctacctcgaatgaacgtcagcaacatgatgcatcaaatcaaccgtctcaagcggctcagacaactataaataaaaatacagaatccgctactccaaaaacggttaacgaaatcaacaagtcccaggagttccaagaacatgtagaaacacccaaacagagcaactggcttggtgggttttggtccactgcgtccgctgctgttcgatcagctgaacaacgagttcgctccataaaagggtttgaagagaatgccaactgggatattaacgtgcgtaatatggtggacttgaacaagcttggtaagtagaatttctcttttggaagaaagagttccttttgctaacaaatgtcttttaggagatttgagcaatggaataaggagtaaggcccttcccacattaagcaatacaattcacaacgttctgaacgtggtggcacctcctattcatgatcatgaagttttgcaggtgacggtatttcatgatctagcaggatttgcacacctggaccgtatagtgtatgaaagctttgaaaaagtaagttgcgtatttacgtttacgctttggacatagcactaatatttgtgctttcttttatgctgtcaccgattacttggttttcaaaagacagataggtcaatgcataatcataattaagttttatgggataattttactgacatgttaccaggtgatgttccaagtagaaggaggtgaattaacggtgttattggataaggaagctaaggttcgaccccgaacgaacgatgtctatgaagactttggtctatgtaatggttatttggaagcgaaaaaacttgcaaaagccaatttagctgaacctattacggaggctaaaaagatgaacaaagaaaacaagcaagaaaatgttggagctggtgatgatgaagacgcttcagaatctcctatggttcgagtaactcacttacttctcgtaatccaagcatttactatcaaaaataaagaagtttcggatgatgagcaactatgctttcttattcaccttaacgatactaatcataacttggagttttctaccacttctcaacctttgccgcttgaatggcaacgatgggctgtggaccctcgatacattaagcttttcggttctaacgccatattaccaaatgaatgggtaacagaatgggtggaacaatccatttctgttgcagcaggtattgttgcccaaatgtatacctcaaagcgtatggcccttggcgatccttctcttttcgctggtttaccggaagaagatgttaacactggttcatctgaaactccagttccatattatgacggagccatgtatgcctaattgattcaactttaatgaattatgaacttttgatgcattgtttcgaatttaaaaaaggaaataacaaatgaaactactttctttgtgccacataatcgtaataatattgacgtgcttttcaatatgatagagcaatgttagagtagtgagcgaagagacttaagcagtagcacagcaacatgtgaatgtttttcgatgagagtgggtatatacgctttaaaaatatcggtacaagagaattaaaacatttacattagctgctgaagagaacacagctgttagaaacaaagcaaactatttgatgagatggaaaggtggattttcttcatctgtttacactagcatttcatctattagcgctctgtaacgtattctgttatttattaattgcaacatattagagtgggatcataagacgaacgtgacgataaacttaacgagccattcattaggatgcaaaataatgggatttagcgagttttaatgggctatcttatttacaaagagaaaaagggaaagtaaaagtatttatggactaagacatgtgcccttttagaaaagttttatttgagtgctagcacacctgttgatgatgaataagaccaattaagtatccgcctcattatcgcttgtcttttacagctagctcatttacgaaactaggtggaaacaggtaacttcgttggcccaagcaggttgctgagcaaggcagcaatcatgtcattagacgaaatgttggtaaaaaaaaaggtcacgattggatgtgaattcccaggcaaaaggtgatatgaaatcaggcaaaacgcattaataagctatttaacctgatttttaactatatactgagacaagcaataaatcttactacgcagtttcttgtgtcacgttaaaggaattgttaataatgaagtgtgcggtaaaggcaattatgtgttgctaatactctcggtataagaaaatgcaaatcacaaaagagtaaaaaaatggaaagaagcttgaattgcaaatcgtctgtcttttttggtaggttggctggtcgttttttactattctttagtcatcgtcggtattggttttgccatatggtcgggaggtggaagaactgaatgaaagttttcagacgcattgcatccgaactggaatacgcattcaattttttgaaaacgggatcattgcggattatttcctattccgcttatttccattgctggctagctgaccgaatcggtttggaattgatgtatgtttccctgttttgctcgacataacctcatctgccagccacctccatatgcgcgattatgactttttgacagtgagtatatggaagacaagagtagaattgacgacatagggcgggcgggaagggcagatgggataagatttagtaaaaagtaagctaattgaatgaagaatgcttgatgaagatggctgaaactgtgatttcactacttcgtaaataaagtcacacagtccgatagttggccagaaagacatatacactcccataatacaaagacacgagccagatgcatcctataattgggaaatcgtaataaaaaacatgtaacaaagtacctctgtttaattattgaaaaagatttattcctattactaaggtacgcattttgttgtggtatacgcgtctttgtttgtttacattttggtggtgtgtttactttctcactgcccgcatctaaaaatattatccgttaccattgagggggttggtcggtgtggtaacggttacccttctcagcctcctccaaaaattgccatgacgtgaagagacagttttccagtatatatatggaaggctgctccatgggaggttcagttttaaccatacactaagtacttgtatcgttctttgtacaagcttttgctgtttaattgagcgagcggttttcatttaaacatctttctttttatttcatttaatataaacaaattaatttcattaattttcatcttttctttctcatttcttttaagtaatcgtgaaaatgcttgctcgtgtcggtaccactttattctttcttgctaatgcacttgctgcttatgccgtctctgtcacttctcctactcgtgacaccacctggcaatccggccaagtgaacaccgtcacctggtcttctgtcagcactgatcccgaggagatggttattatgttggtgaacaatgctcattatcccaaccaaaactttaatctcggaactgtccaatcctccgctggatctttggataccgacatctccatctcttctgatctccccactgacggatggcaaatttacttcaacggagctacttctcaaaaccaaggtagtttggctcaatctgagcaattcgactttgaaggtagtgattccactttggctgctagcaccattagcggtggtatttactcttctacctctgcttcctccactagctctagcactgccaccccctcttctagctctactacctcttcttcttcctctagcagctcttctacccctatctcctctagcatcacctcaagcatctcttcttccgcttcttcctctgttagctcctcttctgccagctccagtggatccatctcttctgccgatgccaagaccgtaagtgctagctccaactccactattagcggattttccacttctaccactagtgcttccagctctgccgccggtaactctagctcctctagctacacttcttatagcggtgctgtttccaacggcgttgcacaactctccgttgctgcttgcatgggtattgccgctcttatgcttattgcttaaagaagctgacaaccgagttggcctactatgcttcaaccttcgaattaccacagagaaccattgaaacatatttcgaaaaaaatatctatctagttcatctactcatcgctacatatgaggggcgcattatatttttagtctgtttttttttatcatttaacttgcgccctctgtttatactgctttttttcattccttttcatatatttggcaaatcatttgaaatctatcttttcatcatcattagtctggtcattttgctactcttttatactaaacgttagttttttttgtgcgcctgatggtttctaaaaagtcacgcatgtcttgttcatagctgatcatcatcatcatatagcaattccatttcatttcatatattctatacagttagttgtgtgtgtagtttctgtaaactgttatagttcaaagaattaactgaattgtgaagaaacgttctttatggtaatgcaaattacttttacttgttccttcattacagtcataaatccattttttgaagtatgaataagcatatatatatgtatgtttaaatttgatctagtttagtgtgagttagcggaggattgatttcacgatggtgagtaaagtactgtttatagataattacaagctgttcattataaatcgttgaaatcaaatatatcatttaatctaagatgcaattttgcaaccattctgttgttagctgtaatacatttacatatgccacacattccaaccaagccgtcggccgttttcgctcaaaatttctcggacctgtagcttatcgctttctgaatcatgtaaaaaatatatcggccgcttctagtaacatactgttggaacattacacctagtctcttatacttcctatttttgtttattccttccttccttccttcctcaattgttactgcaaacccgaaaaaaatactgttacctgtaagacgatgttgaatttgttttgtgttgagaaaagagagcagtcacaaaattttgaaggtaacatttctcattagtgcaaacttgcgggttcgacgttccttctacaaccaaacaccagcagaaaattatcacaaaatgtctcgtggacgcggtgctgcctctggtactaagtatagaatgaccttgggtcttccagttcaagccattatgaactgtgctgataactccggtgctaagaacctttacattgtctccgtttttggtactggtgctcgtcttaaccgtctccctgctgccagttgtggtggtaagtaatatgtttgattaaaagtgcaaagtacaaaagtttttggctttaatttcgagtgagagtatggcctaaattggacggttgcgtatgaactcgattaaaaagttggctttctttgccttggtttcaaggctcattagcaaagctagagtcattttgtatttgataatttcttatatgtgctttttctcttctttttcttttccttgcttatgtttgagcggaaaattttaagattgccttgctaacgaaatttttttagatatggttcttgctaccgtcaagaagggtaagcctgacttgcgtaagaagatcatgcctgctattgttgttcgtcaacgtaaggcctggcgccgtaaggacggtgtttatctttacttcgaagataacgctggtgttattgtcaaccccaagggtgaaatgaagggttctgctatcactggtcccgttgctaaagaatgtgctgacctctggcctcgtattgcttcaaatgctggtaccgttgtttaggaaagaaaaactaaccccaataaacaaatcatttgtccctaccgtttatccttcgtgtaaatttgtaatgttgtagaattcttgtttttgtagcttattggtttgatagtcgttcaatcaaagaaagtcgtatatgcacttcaaagtgttttatataccaattgcttaaagagttgcggtacattttacttacgtgtttacttgaccaacatacaagtttggtggaaaaaatttcgtatctcaaacaatttcatgtttagcatgcatattgcaggtttgtgatcatgatcatatatgattagtgctaaattatagtacataattaaattacaacatggttttctttaaaaaaccgacttaaagtcgtaactttggaacatccaacttctttttaaataaataaacacacaaaattatccaaacatttaaaaaaggatggaaacttccctctaggcaaaaaattaaatttttcttttttcgatgctttttaataagccctttaaacccgaacctccagtggaatggttcactaaccattcttccatttctatacgaattttgcttaactcctccgtcattggcaagttctcttcagaaacgtgcaatgtgggattcaatagtaaatcaaacaatcgatgccacaaatcctggttccagtagcgtttcattctttgcgtcagtacctgtcgtctttgaccattgattacctctatcctagtttcaatgtattgaccaaacaacatggtatagataatcgcagctaacccatgataatcaatttggtatgtccatggcctgccttcacgcatctcaatgcaatcttgtaaatcagtatcccaatcggctataaatttgactttttcttcaaacaaagaaagatcaatgccacgtccaaagtctatcaggtaaatccctttaaaagaccaaccatacaaaccctccggagaatatatcggagaccactcagagtctgcaacggtttctagacgaagaagtgcattatctgctttcaaatcgccgtgaataattttatgggtatgcagggcttcaattatgcgcaaaaattcaatggagaaaaagacaacaagtatttcatccatacccgaagatgaaaaggtggaattatgcatactgtttactaaatccaatatggacccttgcggacgatagtccatcaataaatgactagtatcatgaaacatgtgtagctgatgcacgggaagaattgaattggtttctctcaatcccttaaggcgcgtcattgcctgtctggttaaataaaattcaaaacacgaaggtggtgtctcaatttttaaagcaaaaagcttagattcattgttttctgcgccgccttgagagacgtcaccattttcagtttcaattttggatttcaccaaatatacaggagcaaatgcgccttgaccaagcttgctgataacgctaaggtttgtattaggtggataaaataaatggaattcggggccatcaagagagtgtcgattgctacttcttcgacgtccagggccaccggccttgggtttaattttggagacaaatgactctatatgttcaactaaagcaaaggaagtttcatgctcgtggtagtccttatcacgcaataaagatgggcgcaaaacttgaaaaagtaagtcacgtaaagattgatctaggggatttattagcgtcggtaaattggataaagaagccatggcttcttcataaggcatagtaagatatcctgaaggaccaggcaattcatcatcatttttagggaaaaaaggcttatgttctataggagaaagctggccaaagtcatgttttccgttttcatgtgggatcgtggctaccggattactaacagaggactcatgcttcatgctttggttctcattaacgaacatatatcctttaggcatagctggtgacaaaacagaattagaatcaacagtggaatattgaggtgaacggggtaaagtgtgtaatttcttagggttagtgggagaaatattagaatcctcgggtctccgttttgcattggcaaaggtagtcgaagttgttcctgttgccgtttcctcttgaagagtagatggtaaaagttctgaaaaaggttgctctcttttcacattttccagttcattactatttttatatgtttctgccttagatgctgtatgcgaaaagtctagatttttattaggagaataaattttagaagggtagttttttgaaggggtcaaagagggtataaagtctaagtgctcttcttgtgagcgaccagttaaagaagtcgctccagaattagatgaattttcgtcattttttagcggtgtacccaaataggatgactgagcagaaataggagactttgatgacttttccaatgattcagaacgaagaggctgattaaaaatatctaaaatatctgctagagctgctttcgtatgtatggtaggagaaggtggtttttgtgctggttttggagacaatgcaacaggcattactgtatcaaaaacttttaattcaggagatgtagactttgcaacataagcataattttttggtaaagaacgtgtaggagtatcagattgctcggccacagggttcttgtaaataggtgatacattggatgaagatgaatcatgatgcactgaaatttcattttttggcaccactttcgggaaagaagcagcagtgtttggttgaattgaagaaaggtaacgttgcgcccgacattcttccattgacctttcttctccattttcatacaaagcaaggaaattaaaagcagaatactcaactcgcttaccagagctcttatcatagagcaggggaagatttggagtattcgcttcggattctagggattttgcctgaggcaaatcagaagcattttgtgagtcgcgggaagatgaagcatcggaaaaaacctgaaaggatttaggctttgaaggaagagtagaggatgaaaccggctttgagcccaaaacaatacgaggaggaggaaatggagaagaatagggtgcatcatgaatagaagggtgagcgttatgcaaatcgtaggcacgagagaactcagcagcgttccttaacaatcgaaccaaaggcctcgcttctcgagaaacagctgcatgaaatacttcagaagcctctttccaacgttgcattctaatgagcaaagaaccatattcttcgtagaacaaagcgagttcaaggcctatgcctttcgatgccaattggtaaaattgcttggccgcctgttgcaattcatcaggagtttcgtatgattgtttaattttcgcaagctgtatgagaagatgacgaacatcattaagcgcgaagcgacatctttctaagtactgaatagcatcatcaagcattttgttgaccgtttccatgcccaaaaatcttgtttccaagagccattcgatgcagcgataccaaacatccacggggtcatccaattcttcgataatgtcgagttcctcttgaaacaatgctaatcgctgaatttcctcgaggcgagtcttggactccctgggtttagtttcaggtatgttttggtcaagtacattttctgtaagccgccaatcggacatagtgatacgcacattgaaacatggacgacttttaatagaccgtattctgcacttggttcgacgacaagtattctttcaacttggtggtgaggtaaacgaaatccagcctggtgcagtataaggtataacgacaacaaacgttgctttatatatggataacgacatatacatttatttcttgaaaaaatagcaaagctatattgattttagcgtatgctgctttaaagttgcatttcacaatgcttggaaatgtaacgatgacagaattaatacgatgcaaaactcaaataataaactgcgcactaactcactacaataaacaactttgaaaaaaagattcgttttttcaacatttaccatctcattaagctgagctgccaaggtatatacatacttcatcgaatatgagcgaaaaacaggttgtagggatccttggaggtggtcaattgggccgaatgatggtagaggcagcccatcgcttaaacatcaaatgcatcatcttggatgcagcaaattctcctgccaaacaaattgatggaggacgtgagcacattgatgcatcatttactgaccccgatgcaattgttgaactgtctaagaagtgcacgttattaacaactgaaattgagcatattaacactgatgccttggcagccgttacgaaatctgttgctgttgaaccctctcctgcaactctgcgatgcattcaagacaaatatcttcaaaaacagcatttacaggtttttaagattgcacttcctgaattttgcgatgcacctgaccaggaaagtgttgaaaaagcaggccaagagtttggttatccttttgtactgaaaagtaaaacattggcttacgacggtcgtggaaattacgttgttcatcaaccatctgagattcctactgccatcaaagcacttggtgatcgtccgctttatgttgaaaagttcgttcctttctccatggaaattgcagtgatggtagtacgcagtttagacggaaaagtttatgcttatcctacaactgagaccattcaaaaggataatgtttgtcatttagtatatgcccctgctcgtcttcccttctcaattcaacagcgtgctcaaacccttgccatggatgcggtgcgcacttttgaaggcgctggtatatatggtgtagagatgtttgttttgcaagatggtgagaccattttactcaacgaaattgctcctcggcctcacaattcaggtcactacaccattgaagcttgcccaacttctcagtttgaagctcacttacgggccatatgtggtcttcctttcagcgaaatcaacacccaactctcgacttccacaactcatgcgttgatggtaaatattttaggtactgatgatcctgattatgtttcaaagatcgctaaacgttctctgtccattcccggtgcaactttgcatctttatggtaaagctgaatctagaaagggtcgcaagatgggacacgttaccatcatttctgattcacctcaagaatgtgaacgtaggtatcagatgcttcttgacgtcaaagatcctgtcgaatcacctgttgttggtattatcatgggttcggattctgatttaagcaagatgaaagatgctgccgtcattttagatgaattcaaggtgccttacgaacttactattgtttcagctcaccgcacaccagatcgcatggttacttatgctcgtaccgcagcttcaagagggttgcgtgtgattattgctggtgctggtggtgccgctcatttgcctggtatggttgctgcaatgacacctcttccagtaatcggcgttcctgtaaaaggaagcactcttgacggagttgactctcttcactctattgttcagatgcctcgaggtgtccctgtcgccactgttgctatcaataatagccaaaatgccggtattttagcctgtcgtatacttgctacatttcaaccctcccttttggctgctatggagagctttatggacaatatgaaagagattgttttagaaaaggctgataaattagaaaaagttggttggaaaaattattctgcataggcgaccatagacataactgttaaatgattttgcttgctttttgttttaaataatattttattttgaaattctagattgtaaaatgtattctaaaaagtgattaaaaattaaaaataaaaaccccccgaataatgtgctgcgacgcaattaaaaaaaataagaatcctgaataatgtgctgtgaagcagttgaaagaaaattaaagaacccaatataatatgctataaagcaatcaaaaaataatagtaagaaacccaaataaaaccccgttgaccatgttcccaattaaattaacgcatattaatgcaaaaaatgcaatattaagactagttattaaaccgataattagtcttcaattattaaaagatgtagttgatttgtattatctttcaattgctaattctaaatatattggagaattcaatgagtttatgcattgaagtttaagataacattggcgctgattgcagcaaaagtaatcacgcatatagctgtaggaccaaaacgatcatcatatcggaccgcattatgtttggctatgttaacagctctccacaagtacaaaaacgtggaatagaagatagcaaataaagctaccaacgtgaaactagcagctcctaaaataccagatcgcgtcttagcgaaactaaataaagttataccgatggaacccatcaaaatagaatagcgtagatagtccaggtatgtacgctccaaggcaaaatatgtcttgggctcaacacggactgggacataaattcgcttaccaggaggcgacacatacttttgttcatatatgaccgtaggctcagtaggttcttcgaacttgggtacagtctccaagaaaaatgaatccttaatgtcctttaatctgctgttgagagctgcaacgaatgagtcacgtcctttccttttggaaatatcaagcaaattagtgcgttcatcgagctcttgaaaactgtccgatgtttggaaggtagaattgtcattccgggtactagatgagccaatacgagattcttcgtcaacataattgtcaccatcggcatgaattggtgtattctcagaatcggtgagtacattcgcagagacagatgaactatgagtaccgctttgactgcgtccctgaatgaaagtgtgagtagcaggtttacgaatatcaatgtccatttgtgggaaccaatatggaagcaaagtaacacggtcgtaaaaaagagtagatacaccgtggatgaacttggaaaacttagggacagcctcgaccaggtggctattaacaagattgttaacccattcaggaggatcttgaccaaattgagtttgcaacttgacctccaaaatggcataagggaaacgaacaatatcttcatcaggaagttgatcaaaaggatagtcaattccaatatccattcttctccagttgttaccggcgcgggacggaccgtcttccctaatcaatgacaagttcgtatcaagagaaatacgaacacgtgcatcacctggaagttgaaatgcagtacgttcataaaagctgcgaacataaggtttcattccacggctcaaaacagtatactgaacttccttggcaagcctttcaagactttcgatttctttcaaagacttcttgccatctttacgcatcttggcaaatgcttcttcgacagtgtaatcacctcggagaaaagcatttacatatttctctttaaggggaaatctagctttcacacttttttcaccagtccagtcttctctatgagtctttcgttcaacaaagatattgttgttatccatattaccataccaacgaagacgaatagcttcggcgccttcacgcttttccaaacggcctaagtaaaaatccaaatcatcgttatcatagtagatactagtaatagcagcatcttcacgagcaaattctttgttaggattgaaaacaagtacaggaagatgctttaaaatgtaaatcttcaattcggtaacattatttgggtgaacccaatatttagtggtttgacgcacgaagttttgttgtgtaccaccggcagcactatcacctttgatagggctacctctagtacgaacgaaatcgtaaagcttactgagcttaacaaccaataaatcatattgctctttgaaaaatggtttagcatttaaacgagcagcaaaaacgggcttaaggatccaacctgtatgtttgtcgtgcttcttgatgattttataaaacgcagtgtaattaagttcgctaaatttggccaaatcgtggacagtagccataatgtcggtaagttcagtttccaagattgcaaaatcattttcattgggaggattatcactatcaagacgacgaacaacttcatcagtttgttcttcacagaatcggatacgttccataacttcggcagacttgttcttttgaaaagaataaactttatccagctccttttctaaaagttcaacaaagtccgactcgtcttcctcactccaaccaccttgatcattgcggcgtttaatttccttctttagtttgtcatagttgacatatgaatacttgtattcatacatcaacgtttccttcaaaagctgaccaaacttcatgttgcaattttcaataagttaatctagtaaataataaagagggattcaagggaaaataaacgtataaatttgggaataaagaatgattgaatttttaatatcaaagactgttattaggtgatcccttgaaaaattcgacgaagagtaaaaaaagtgaaaaacaactgcaaacgggaaataatatcttcctctttgggaattttactagtatttgacaaacttaagtgccaaacagtaatatcctacgaataaatcttcaatatcacaaaatttgttcacaaaacaatcaaagagacaacaagcacttttgtagctataacttaagcacaaaaaaaattaaaaaaaaggtaactccaaaaaaaactctgtagagtcaaaaaaaaactgtaaatatatctgtaattaaacgagcttgaacgttggtagtttgcaggtgtggtggagagaaaaatggtcagggtggtagtggcgtaaagatgaaataactcaaaagttgacaagatcgggaaaaggcgatccaaaatcaatttcaaagctgaagaagttgattttttaggtgtgaaaatctgatgcaaattaaaaagcaaaatgtcctcgaaacatgatatttctgatttcaaataatcttcattttaaagcagttaagtataattcattatgttattttgcgttgagtttgttatgcctcgatatatccgtttcacgatcccaaacagtcacgcaaaaagttggttttcagagcaataatcaactctccgtgcgccttacacttctaacagaagaagtataaaacaagaggacaaagttggtcagtttatcataaatttaagggttctatagaaaaaaagaacgtgtacacttgaattttgcgattgccttttttttcggtggaaaaggatagttaggaatatttcattaaggaatagcattcaagcaaccaaatcagcgctgtaaaattttaataattttattttcattttcatttcataattcaaaatggctcaaagagttacttatcgtcgtcgtcttgcatacaacactcgtagcaacaaaaccagaatcatcaagactcccggtaataacattcgctaccttcatattaagaagcttggtactatacctcgctgcggtgataccggtgttcccttgcaaggtattcctgctttgcgtcctcgtgagttcgctcgtctctcgcacaaccagaagaaggtccaacgtgcctatggtggatgccttagcgccaatgctgtcaaggatcgaattgttcgtgccttcttgattgaagagcagaagatcgtaaagcaaaagttgaagcagatgtctcaaaagtaaagttcatgaaaacagaaattaattatattgcgtcactgaattaagcaatctatattaatttttgatcagcttccttctcttttaaattggtatttggtattcattttctgtttgtgcttctttttattttgttgttagttataagcttcgttttcgacttttttaagacgtcaaaaattagattacttaaaaaaatgtaaaccaattataatagcaacgtgctacaaatagaaacagttgaaataaacacactatgatgaatgtatctactttgacctgctgtagaatgtatcccttaacttttaagtgtcgtcttgagatattgatacagtgttcatcaattgtatgtcactattagttgtgtcttgttggattatcgattgccaggcatagaaggatacgctattagtaaatcaaaagagtaagattatacatttacgattcatataagcaactgcgaacacttgagctacttacttttcctttttgacgttttcgaaactcctgcagataaaactttcgtaaaagaaaactactgttatttgaaagtgaaaagaattactcgtatttagtacaggtttgtgccaggtagacgtaacagctaaaataaatgctaagtaatttatgatgacttttatctcaaacgagctgaaagattgaatatattcttccgaggtttatttgacgttacctttttactttgcttgttcaaacgtacaatattttcaaatctcctcgggaggccttatctttaatatagtccttataaagttggctattttcttttatgtatatattacttctgagcttgcgctaagatggatgatgcttcatttatgcagcttttgttcaaaatacatgttataacaataaagcttctttttgatccttagatatacttcaaaaaattagtctaataattataatactactaaatatcatgtatacattttttgactattataattcatattactatgtttctcgtttataccaatcactattgtgaccaagggcctatgtctttttatttttacttttatttattttttttttttaattatgtctcgtagagtatcgattgcagatatttttatttattgtaaacaaaacaaagcccgtctatacattaaatcgaaagaaggtttacaaagaaaattaaaagtaaaagaattactagaaaaattcatttatgtgtgcttttgcaccaaaagatagtaaataagaaaatgcaaaacaaatttcggtttcatattaaatattgtaacattgttgcaatattctattgtcttagcataccttttataaaattcaatcatagaatgctgttaaacgtacaatgcaaatgtaattgataacttatatttttgagtccccgatggcttttcttcgtttatttatcagacagttgattaattacagttttttttgtttcaaaaaataaaacaaaataacaggtatgggaaaaaatatttttgtttagattttaaatgcacatcgttcaccgtttattgaaaaagcaagttttaaaattaaaacgtcaatacctttttgtttgtaattagaaaaaaaatataaatcatataatgaatgaagtttagtaagtttcaacttgttcgcgaaataaaacgacgcacctcacattttctatcaaggctgcacactacaaagcgataaaaatagcagtattcaattcctgctaattttatattataatatcaataaaataaaagaaaattatgaaaaaaactatcgagttatttgttttttttttgcatataaaacaacattaatccaactcaaataccgtactatgatacaatacgataaaatggataaggtatactgaagtgccattttaaatgcttacttatacgtattcattttacaagtctttctttcccgtatacagcttttcagtatgaatcgtcaaagaccgttccagcagatgaatgatttgatgaagcggggacttcctaaaggaaaatatgcttttacaggaactggtttgttgttagctcttggccttgcaggatttgctgtgcagacttctctttttaacgttgatggtggtcaccgagctattaagtatagcaggattggaggaattaaaaaccttatatatcctgaaggaacccacttcttgattccttggatcgaaacggccattgattacgatgttcgtgctaaaccacgaaatatatcttctctaaccggaacgaaaggtaggttacaagaattaaaacgttgagcgtacataactaaaggtgactgtaagaaacattcatttggtttttatacctactgtgaattaagcttttagttgcaaagtgatgaattgtgtttatggattctactcttctcgaatagctaagctttgaggggtttttgttggttgtattactagaaatatgttaaccatttttctttagatttacaaatggtgaacattaattgtcgtgttttgtctcgtcccgatgttcatgctttgccaaaaatttatcgtactttaggtggtgattatgatgaacgtgttttgccctctattgttaatgaagtcttaaaaagcgttgtagctcaatttaatgcaagccagttgatcacccagcgtgaacgtgtatctaggttggttcgcgagaatttaatgaagagagcagcccgattcaatattttgcttgatgatgtctcacttactcatggtatgactaacattagtcaagcgtttgtaccttaaaatactaactgcatccaatagttcaattctctcctgaatttacagccgctgtagaggccaagcaaattgcccagcaagatgctcaaagaggtatggttcagctcttcgtacaaattcaatattaacaataattttttagctactttctatgtcgatcgtgctcgaatggaaaaacagggctttattgttcgtgctcaaggtgaaggtagagcagcgcaactaattggtgaagctattaaaaataagcctggtttcatcgagttaagaaagcttgaaactgctcgtgaaattgcaaacattctttcaaagagcaataacaaggtcatgcttaatgccagcacattacttttagatgatattaaatgaagtctaatgtaggaattgtcattttattaataaacaaatttaactttttgatacaaaattctctttgaaaaccataatattcgctgatttcttcaatttctgtttaaaaaaacaaaaacaaaaacaaaatcaaacagtgaagtagctccaactattaatctcaaataaatattttcatttctttgactttttggtattaccgctagatccaaaaaccatctttaaacgactcacacttataggagcaacaatttcaccgtctttaaggttttcaagataagcagcttcttttgatgacttgggaagttttttcatgaagtaggcgattgattcccttgccgctttcccaacttttccagttccaggcatgacttttaccttctggttaaatttagtcatagcattgtatggggcaaatgtcggaacagcgtttatcacagtatcctgctgttgaggattaggggttaaagaatcaattgcaaaaaatatttcttcgaataaactcctcggcatctcttgtctttgaaaactttcaaccttcgcatgctttttttcgtctctctgttcagtagacaaacctttttcattctcagcttcactgttacgactttggtcttcaattacttctgcactaatgggctcggagacgccatcttcttcaatctctgattcggcagtgggtgtttgaacgtttgatgaatcattagaaggaatttgagacgaaatttccatttctcgagccgcatgcttcttcttagcctttttttgttttaaaattgccaaaatagtttgtgggtctgtagcatcctctattgaaataggtgctttaagagattcctccaaagcagtttgccttctagcgcgacgtgcttcacgcctttctttggcagatactttcttagctgttataactttagaaccttttttaccacgcttttcgctgacaatatggatgtctgaaccagtggtatcaggagtactttgattgttggtgtcctcattgtaactgacttcagacacaacatcttgaatgttatcttcagaagttaccgaagtaccttccattttaagttccgacacctttccttgagtttcaacaacctccatttctaaccttctagctttgcgacgctcagaacttttttcatctaactgccataatattccatatcccataatgaggacagtaggaggtaaatagttttttttggcccgaatagcaaaacttcctgttggaagaatttcacctgttggagcaagtttcgatacctcatcaattcgaacccaccatgcactgattacggtctttgaatcccatgctttagatgaagccaaagccaaggatccagcttgttgtagagtattagggggaataggatcatgaggatttttgttttttacaataattatcgaagactttggcaaatctgcacaaacaaagatatcacctgtgttgcaatacttttggaaaagtaattcattttgctgggcatcacggcctcccagaactagataaccttccgaagaaataaaccaatgaaacttttcaaaaaagaatgtctttctaccaaggagaatacgttgtgtatctgcagtagtagagcgcttcaaatcctgttcaatcttgcgttgggtgcttttcagggcttttgaggctgcctccgcagtctttgtttctttaattaaagcttctcgacgtaattcatactgtttacgcgcatttgcaaaggcgccaagagataaatccaattcaacggcaataaactttgacgaaacttttccttccttcactttattatcatcatcagaatcatccaaatcatcatcgctggtttctgaactttcatcagaattatctacagactctggattaggaagaaaaacggtaacggcgttttttataagtttaaggggaatttgaatagcagcagctaccggacttcttcttttttgagattgaattaacttttcaatatctaaccaatccattccttggttcaacagagagttaatgtatgagataatagcctcaacaagttcagggttcatctcaattgcctgagccctcaacgcacaagtagcttgggcatcttgtaaactttgaagttttcgtgcttgatcctctttagccgattcaagccttcgctcagctgtcgctaggcgatcatgtgctcgtttttttagcttttgtgcttcgatagaagagaaaaactcgtcaacgcattcgttataggttggaaactccatgcactttctgtttgcctgaacgagctgtaaaggctgaaaagggtgaaaatcttcgtataatgtagtacattcttcagggtgttgaggatcagcagcatttgttagtgcttgctccagtgaaaatatataaccctttactgggggcttattaactgcagctaatatggagtcggcttcttgaaaagcagctaataaatcgtttttcttggtttcgtctgcacagagctggcaagcagggaatagtggatctaattttgaacgccgaagacagtgctctataagtgcattaccatattcacctaatcttatagtcaatgcttttctaagagaaactggtttgggtactttaatcggctttgtagaagaggatagttgttggtcaggtaaaggttcgttaatagaagtaggagaagcataagcagtgcttatttcatccaaaaggatatttaatcgttcagctgtcatatgaggaatagtagactgagatttattgtcattaacgagattatttttgtctaaattgtacttttgccctacggcataaacttggtctttatcgaaggtgaccactcgtaaaagagacagaatcttgtaatggccgtctaatagtaaaacatttccagcagcgaaaaattcacaaaccagatagtacgtccaatcggggtcttgatcattcgcaccacctccaaatgtgaaaacgagtactcgatcagtacccaactgagagacaccagttaaccttctagattttatatgttttcgtagcttcgttacaaacccagacaaaggggcattttctcgatcaaattttgttaaatgagcacgaaacccactttcaataacaatagaatattttgcatcctttaacgggttagtaaaaaaatatttattactttctacacatacttgtttaccaaacttcaacaagaaggtacgcgcatttagatcataaaagttattcaagcgacacccaaccacttgttctcgtaattccgcagcaatcgcagcaatatctaaagcggaaaatctttgcttcatttacgtctataacacctatctaaatgaatttctgcgttacaacaaaatgaagtataggctctagttagaatgtaaacatgtgtataacgtaagtgaaactgaagcactaacaaagcgcaatgatatccgcaatatgtaataaggaaaattatagcacaccattgcaccataaaacggtgtacattagcagcattaaaattcttagcgcaaatttggattgttctctcaaattcattatttctttcccgacgatgattctttaatcgtacatttatagtcgtacatgacactgattataaagataaaaaatagttaactaatgataaacttataaaaaactttgacacctaatatgtcaaactggtgtgaccaacccaataagtaaaaccagaaagtcaagagttatcgttgctgaatctaatcaagtgagccgaaagttgattaatcataatttctgattaccccgtatctcattttttcaacgacatccagaaactcttaattgaaaaagatggctctaaatgtttaccaaataacgagtactaaagtcgaatacaatagccttttaaacagtataatgcagtttaatggagcatcggtaatggcgtttgatattttcaacgagtaaataataatggaaatttggcgtacccacaaactttgtgcattaacatattgatttgttcatatctgagaattttaagtgatccaatttttgaaagagtttgagttgggatttttaaggtaaatcgattattggcttgctttggttgttctcagaaattcgacaatggtgaaaaacactgttaaacacgtcgactcttccaagcatttagagaaagttgcatccttaatcaaagaaggaaaaggtaatgacttttaattttctttccttgaccatactaatgcgattttatcgaaaatagtaaagaaaatatgtgttatggttggtgcagggatcagcactgcagcaggaatccctgattttcgaagccctgagactggaatttacaataatttacaaagatttaatcttccttacgcagaagctgtttttgatctatcttattttcgaaaaaatccgcgtccattctacgaattggctcacgaattgatgcctgaaaagtatagaccaacttatactcattattttatacgccttttacatgataaaaggttactacaaaaatgttatacccaaaatattgataccttggagcgtttggcaggtgtgcctgacaaagctctgattgaagcacatggctctttccaatacagccgctgtattgaatgttacgaaatggtaaggattgtttttgaaaaagttaaagtgaaaaagcagaaattggttttactgacggaaaacaaaggcggaaacggagtatgttagagcatgtattatgcaaaaacaggtccctaaatgcaacagttgcaaaggtctcatcaaaccaatgattgtgttttatggcgagggattaccaatgcgtttcttcgagcacatggaaaaggacacaaaagtctgtgatatggcactggtaattggaacaagtttacttgttcatccattcgcggatttgcctgaaatagtgccaaataaatgtcaacgagttttgattaatcgagaaccagctggcgactttggggagagaaaaaaggatatcatgatattgggggattgtgattcccaagtacgtgcgttatgtaaactattaggatggtctgatgaattggaaaagttgattgatacgagtgttgaaacgctgacagaagaaatatctttactttctgttgactctacaatagaaaagaatgcctctgaacaaaagaaagacgataactcggtcaatcctttcactaaaatagaggagaagaaaaaagacgaggtgacgctgttagtttctgatgatgaatagttcagttattcgggaaattttctatattgtcatgattaaaactaggagatccctatatttattatactaagaaaacggaaattcacgattcggtttgatgaatatttgaatctacacatacgattcgttttcttttaaacaagtttaaatacttttttttatttcagcaattttataatatttccttccaggcgtccttttgattgcctcttaaccatgaatcatattgctctctttatgagttgtatgctgggttaaactaatgcgaaaaggataacaaaaagggggttctgtatacgatctcgatcaaactcatgaagatgccctcgcattttcgtgaaaataacttgcattttttttaaaattggcgtccatctatatacgcaatttgggttatgagaaagttgcgctagaataattgataatggtttcaaatttactgcactgtaatctaatacaatctttgtcgaaaccttttttctgttcagtttggaacatatagttctgaaatgggagattattcattttcatttaataaaactttgaattatccaagaattggaaataggaataattaatcaaattgttctttttgtagtttcattcaagaataatgcttcctttgaaaaactaaagcgttttctacgaattgtatattgtaacaggggacggtgtataaaccagttagtccatcatcataaccagttctgatttgaattttgttcttgtggtcattattgttcataaaatgaactagagatgtaaagacataattcatattacagaaaacaagtatctaagcgcttgaacaattatcagttaattttagaacaattattaaatttatatctattttatctgcatatatctatgtacctttgggtaacttatgagttgtacgaattactgactacatggctgtcacctcctgttcggtttgctaagaatttaccgattctaacgcttccttctacctagctatacaagattcatgaatttgatctatatgaatgcttagcaaataaataattgttcgaaagccagatatatgatttataattaacgtttttagatttgacgtcaatagggatcttaggtctcaatttctttgttttgccatctttttatacaggcgtgttaagcggtctggaaagaatttaaaaataaaagggaatgataaatcgtgttatcgttgcaattgatcaattcttatcattttaagaactactcacttttttacagtagttaataaaagttcatttgtaatctttatcttgattcctttcgttgaggatcctctgaacaaaagaattggaaatttacacattataacaatgaaccccaagcgattgaggatcaccggtcctgaggatttgactgatgcttacgacacaatgccgtttcgttgtttaaatggaagcatgcctcctaagacaccattaaattttgtctttaaggaaaatgactcacacgtttcaaatggcgtaggattgaaaaaagattgcattgaatcaatagatgatttgaacttagacgactggtcagaacaacaagaatccattttgctaatggtatgacaaagatgctgaaaagaattaaggaaggagaagcaaacttggctgcatccctccttttttgcacaattaaaagtggcgaattttgaggtgaaaacatgttaaatctctcaattcgatttacaaagatcccttcgttatgcaaaaacattacaaaataacccaatttactaatcaactatttctgttagtgctatgagaatgaacttcaaaaacccataacctgtactcccatgggccctatatgtttatgggcccctcctgagccagttctacgatctgtgcacaatacattattaaagatgggttggagcatttccgagaaaaaaatgaaaaagaagttgttggagctacttgcaaaaaataagaaaagaagaactatgagaaaattggaaattgacaccaatctatctttgtacgtaaacatatcatatatgagaggttcaatgtagtaaaatttccatctgtattaacattttagtctaaccgacgttcaacgggattctccaattatagaaaatgcacctctacaatcccctttccatttctagtagggaattcatttttcttttcaacttcgcattgtaaatgccacttgcgttgtgagaatataaagtatttggatgatttttcttttatatgacaatggcacgtttcctttgaatgcctgaaaggtttattgttggtaaaatgattttgttactgtgttcccagtacctagtttatatacatttatctcaatttatagttttggttgaaaaatgaataagattttaaactattgaacagtaaattgtcgttaaatgactgagctttaagtgatagtttaattgaagcgggagggcctcaatcagatttgtatgtgcataacttatatatttttttatttttttatttctatttttaataggaagtcgtgagatcatagtcttcacataaatgcatgtttcatcatgtcatttcgaaaaattaagcgtccttcagcattttcatttctgtggatatgtagtcgaagaatgcaaagggatcgctcgatactacgtgctgataaacgaatcgacttgccaagtatgttgaaaagattgcacgcaaataagactcaggaatacgttcaagcattttttcaaggccaattttagcttgcagagtcttgggaatagatgctcttaatacagcatttctgaaaccgacatccgcccacagtttctcatagttgtaaatatcgtgatcaagtttgacaatctctgtggagagatggttgctaagagaagtgtatggaatcttattctccgagtgacccttccatatagcttcaaattcgaggttggcgtttctttgaataattctcttaacttcattcacgtaatctgcataaaaagttggaacctttccatcatggacgcacatattttccttaaaagaagcatcgtcaaacgaaagagacgccaacacttcaagtgaactagatgttactccacctttgttggccgaagcatcacgaatgacaattacgccagctttttccaaaactgacttcgcatcctgagttataaataggttagctccctctacaagatacttaaatgctggtctaccatgatcgtcaatgagttgttcaacgttattaatgttaattgcatttggacgcccaccgcaaggaacaaaagtatcggctttgtaacgaagatgagcggtgttacggaatatggttccatttcggacaatttcaccgttcggaagctttagattagtgtctttaacaagaactctatacccttcggggctaagtttgccagcatcaaaatgatcaatcgtcttacgctcatcggctaaacgaagtaattcagttcgatcaagaccagcgggatcgtagaggacaccactgccatctataactgcaatatacttttcgttagaaagtttgatctcattggaaccaagatcaccgtctggaccacccgtttgaactttggtgagtttagagggatcggtgatattaagttttttgtaaattccctcgacgtaacagcgaacagaaagcgatgtcataccatatttatcgtggggaattccacccatggtaggcttcttgccggtgaaaaatgatttccaccaaggcgcgttacgtctatgtgcgtgaatggtcgcccagttaaccaaatcagcagtgttttcatcaggccccataaacagaatttcaggcttacccaatttatcaacgagcggttgacttttattgacaataagcaagtcaatgatactatcgatgtatttcataaaagccaattcgggcttatcttgacaatcttttcctagcagaatcacacctttggcgccgccttctgggatgtccttgttttttagcatttgagtcttagctagattataattctcatcaaacaaccctctagcattcaagccaaatgcttctgggttagcagacttgataaggcgaatgccacctctagcaacatctctgaaacgaaggtgaaaaccacggaattcgtttccaatagacataatcatagcatataagggatctttgtattgtgtagaatccaaaaacgagggatcaaatctaaaacttaacgcaacttttgtggtttggaaaaagttcgttttcaaaagatgtgtgttaaatttaacaaacatttccatgacagatacgtcttcttcattcgtacaagttttctgaatcaggtccataagtgcagtagcagacataggagttatagaatatgtactggcttcatcagcaagtgatgttgcagatttcgcacgatgtaaatgaggtgtcgaattatggtttatggcatgttcaaggtaaaattgctcaaacaaagtgtggaccagtcctggatactgcataatggtatcgtgaatctttgttcgggtaaaggctaatgttgacaaacggcgtttaatagtttcaaggatttcagcatggatattgtttgaatgatctaaaattgctgacaaactagaatattcaggaccgagcttgttcatcacgtgctcgcaaaagatgcggacacaatgtgcataagtaacttcttgaatggacaatttttcagaaacgaataatggctggaaatctgtggagggcaagcagtaaagtaaagaggcttctctggtaatttgagaaaagagttcgttgatagaagtaacagcagcattcttaaaaagctcaggtttaaagttatagctgataattgttacaccattgctaaactgttcaacgtatgtacgagtggaatgcagtccataataacgaaataacttggacaaagaagggaaatactggaaaatagatccacgacggtaacctacgaccaaacggatctcggaacgtccttgataatcaaaaaggcggacaacagggccaaaccttgtaagaacagaattcattacgtcttgatacatctcaatcgtgttgtctgatgccttttccaaaaatgttttatcagaaacagaagcaatatcagtaggtacatcgggagaagcatctttttttggattatcaacaaaatcacatttggtaacgaaataagtgtagatattggaattttcagtactggtgcgatcgatgtttgtgactgaggtaaaagattccactcgatatgcagttggatctgtcaatttgaatggatccaagtaccgtgtagagatgctttcttcgacagcgctagattggtcaagttcgggctgagtaactggagaactatctaagtaaatagcgaggtcttcattttcattctttacgtgaatgttcaattcctctttcgcatgtgaagcatgcgcggcaattttcgcagcataaatgatctcgatgtggtccgcaataatcgaaactggctccatttgaaagtaataatcatcaaggcctagcttgttgtaaaaacgatccacctcgtcctcaaccaaatcatcgggtatcgttttacgctccgtacgtaaacattggatgactttgctcttctggtcttgcttcccagaaaagacaatgggtctgtaaccaaaaaataccgaatccttatacatattaggaggatgacttttggtaagaagcatcttttgcgtagagaatgggcgagatgcacgagcagtgttatgttttgacttgttcttaaaaggtctttccagtaaaggaacagtagcaaaattactatatcttctacaattggagaaggatcctctaattttaaaaggaattgtgcggtgatttaccaccgtcaataactgggtcgtatgaatacgactataatgcggtatctgtttagttagatacatcttgaacaatctgaatcttgtctctttgacaagaaagccaaaataggaggttggcagtaaatttctataaagattgaggaagtgagatcacaaaaaatactaccaacttcttataattatataccttgtatcccgagctctccacctcacaggcttgaccgacggatacgtaatgcgattttaggtaaagggcctacctaaattaacgaatgtttttccaattatattccaaagacggaagaaactaggctggtacaaaataaatgtccgcaaagtttcactgtacacctgatgttatactgcacggctatacttatgtctcatggatgcgcattttagccagtacatatatagtaaaggaaaagaaagatggaacggaaaaacaaaatactagatcgtctaattataaaaaagcagcaactttgtgaacggtttaaaagaacaattgatttaaatacgcagggcaatcaaacaatttttgtaaaacaggtgacaagagccaagtgacaaaacgaaagaggcatcatacagcgtctagaagaaaaaagtcaaggaaaaagaaggatggctgccccttcgtctcgaatatttataaacgttgttcatagtaatagactccaacgttttatatttcaaattaatgaaaaaaaaatgaaatgaattcttcttacaataaattaaaatcagatgccaacggataacgtggggtaagagaataaactgactgagaaaacaagccgtgcaaatcgctaaaaccatagtaggatgcagctttcattaggcggaacaaaaatattgttaggccaaaatccaaaaaatattgactcaactgacatcagtcggcgaaacaattaattccagagtcataatcttaaattctagtgataaaaaaaagtatgcgcaactcctttaggggtagatttgatcacgaaatataaacatttaagcgatattttggccagttagcaaatttagacaaacattttaatttaatcaagataaaaacacgatgctgattttgaaaggcgtaaataatgaaggtggcagaaatttccaaaaggctagaatgcaaaaggagaaaatttaaatcaaaaaaatgaaaccaggtacgtaaatctagtaacgattcaaaacagctgtcaacaaaccaatttatcatgataacaacacgatgtttcgagactgaaaaaaattttaacgccgcttattaaatttttttccttatagctaccaaaagtttctggggttttaatgtcaaacatttttttcatcgagttactagacatgggataaacagtagcattaattcaaaacctagaatttcttggcaaatttaaatagtgtttaatgctccatatattgttttgagttctgtgacttaatcatgctgaatacacgaaaaaaggcttgcagctttaaagtcttactacacagaccagctaagaatggagttttaagtttttaataactgagaacaagtaaagctttgtgaaacatgagttattcacaattggacgcgttatttccgtaaattttaggatttgacgatgaagagtttaaaatatttgtttaggctctaatgtgtttgtgatattaaggacttatcaattgttgaaatattattcatcatttttatacgctattatgaattttaaaatcagaagctgcttgagggttttagagatgtgttgtgaagtgggagaaatattttcgcgttgataagtgttagccttaataagttagcacacactatttatgcatacacaaacgtattctgtagaacttaatcaaaagtgtgtttaaacgcataattcttcttaaaatctttcaatagagaattaaaatataaaagaagtttctgaaatatgtgatttaaatttcaatatttttttagtagatgaactagcgtacaattcacgaagacgttagaatacgctaatttttccaagtgtgatactttatatctaggaataactggtacatccatgcgtaatttgagcctcaatgttagtactgtttagatttcgatcagcttttcatagtcattagcacttcatttctaatatacctattactttttatagaaagaaagaaattgtctttatatatcttgattggcctacctgtctactcattaccatttatgtatggcccctattttatttatcaaataatgaatgataatgtacaatacactatcctgatatagtgatatgttactatatgttaaaaatattcgaattttacaaatgtaaaggattggagaaaagcttgaagtttactagaaaaggaaaatgaaattttttagaatcaaaattccttaaaactgtaaatctaaaaattatttaatgattcaatatctactttacgctcatatttcttaataatgagtaagtcgattgggagtagcattaatcatagacatcgactcaaaaaatagaatagttgttgatattttattaagagttcttaaaacttgtatcaaaaaataaaagaaagtaattataagttctcaattgatattgtggtcaagttgagtcattacgatgactttaaaaaaaaaaatcaaccgaatataaatttacacactatcacgcattgtttcccaatagcaccgtgtcctctggttttttaataacgttgcagctatccgatgtatttcgcatacttagagaactcttcatcaattctcaatttcttcatgtcctcctcccttaaacaaatagcaactgtaattccaccttccaagtctttcggcataaagtaaatcaagccctctatcgggataaactggggtctccgtacagcctctggttttcccaatcctaggttaaactcaagctcataactattcaacttagcccatgaactcaaagcaatatcggtatttggatcaaggtttgagcaaaaggagattagatttttatttggactacgatgaattaaagtcgcaagtgcactcgattcataagcccgtgtttttggatccaaagctgaacgaagcttcgatgcaaggccacccaaaggctccttcatcaactcttcaattacacatctctgtgacttcatgttaagcattagtcctggatacgttggtgaaatattgcagtactgccgtacatcaacagcacgacaaagtgtggatgtggctgtagggttcaatcgagaaatgcagcagcgaataatggcttaccagacgaatgtggtaagggaatcgtcggtggatatatattctgaggcaaacgacgaggggagagtttttgtagccagtgttttaagagcggtgagtgagttatggtcgaagcaaaagtaactccaaatacatttaggaggaggaggatgtgatttatcaacgctttcaagttcggaataaaaaggaggtgacttcaaaatgaaatgatccatctcagaacctggttcgtaagagtcttcgagtaaagggataaggttgtaacggggaaggttaccatcgctagtaaatggttcattgcaacaagctttagaaaagaggttgataacctaaccttggccggtcatatccattgcattgtgctgaccgacaaacgtaagcacgagaccaccagtgatgaaactggcttggacaaggaaaactggatctgagcctaacgtttgttcatcaggatctcctggaatcgttttgcgaggtgcgaaaatactttcgttcagcatactgaaaggaaaatcggcttttctgagcgcgtccatggagggtatagaagggacatgctgaagatctttgacaaagaaaggaggcgttttctcatacggtttaatcttgaatatattaaagctttttccttctgaactttcgtgaacaacctgaccagctagccacggaaaactggctgacagacgctcaagtccatttgtcagcgtctcaataattgctgaatgtgaggaatcatcatcgactattggaaaacaaaaggatatctgggtatagattttaagtgataattgctgtgctaaaacatccgcgaaatcatagttgtttcatccatgatattggttgcactaatatgtagtgggctgatatagcgtacatgggtatggtatgggtacgactctctgtagcaggctcaattaagcagcttgcttaagaaaaggaactgtagggtttctcaatacattttgccaactgaaggaccatgtagcattgagtattttttgtaggttacaaggtaatcgcggcaatgtgagttacgtgttgaaagaattttggagtcgaactcaagtccagcagaaatgtctatttttatacatattggctcaacctccatctacactcatatgttaaaatggttaaacatataacgcactcaagcacattagaatccatcaaaaaaacaatcaagggttacaagatgaacgtttatggcttaaaaaaaaccatctctgcatctaactgcatcaagaattcttaacccaaataatgtacgtcgagctattagtaaaagcctgtttttgtttatagtcttaatgtttaactaaaaaagctgggtctctagggaaaagtatactattaaaatcagcaaatacggtatattttagatttatagtcatgattattcaataattcgttcaatataaaaggcataacaaagagtaataggcactgctaataattgtgcattttttgaaatagtcagaatcctctggagaataaagtgctatcttcttatcagatgaagataaactcacttaggcctatcaagcaaaacgtaactttagtaacaaaaggagcttgaagatcttaaagataatttgtattaaatcataattgctaaataaattaataaaagggaatatgtggtattggagtttcgcccgtaattttggcagttaaaaaatggcgacacggttaaaacaagtaggtaagggtgggtaagtagttttgaagatggaaagaatattgaaaggttgcaacaggttaggctgtaatttaaacaagtaaaaaatcactttttattatattcacagttttttgactttttttttttattttccagtcgttatacaaggatcgtcgtaaactaagatacaacagggtaagttactcatcgctttcaggtaaacaagaacactgtctttttatgatgattcattttgaattcggacacaaaaagcagaaacgggagacccaaagaaatcaagcttttcgtactacttcaaaccggaggaattaagtcttaaacggttcaataatgcatttaatatgggcagaagcacataacgatatcccacactaggaaagcccaaagcaaggctaattaatccaagcaacgaaccaaacgtcaaactaaacatcaacgagaataaaagtacaattaggctaaatttaagaaatacactttgatgtttaaaccattgatagccctctttggatacctcttcaatagacgagtagctatagcgcgacataagactaggacgaccatcattttctagatgtggagattgcccaattggagattcatccttcaattctcttttgatatcgatattctgttcagtcattttgttttgtggcaatttagtttaatattcaatgtgttccaaaagaaaaataaacgttaataaaggtaactgttgtattattagacaatagtccttagcaatctatttaaatgtaacaattgctttagtaatttatactttttctcttttaaagtcagtgaaccgttgttgggaaaagtcaagaatcaaggttagaaacatatacgtattcattttatttacgccttcccccacattggatattgccaacaatgaacaatgacattaaacttctgcagaggcgaaaataatgctatacattcattttatttattaaaatgatttatgagcgaattgccttcttccaacagtcaaactcgaattccccttcactaaaacatacgggaactgttttgcgcagtgtccactattgggaaatggaaaaatcgaatttgctagacgaatatggatggaattcttgtctattcctttttctattttttgtttgattttttaaataaattagcttgtttatcgaatttatctggatggggtttatcgttaaaaaaaaacaccctacccaaaaaaaaaaaatttatttatttttataagtatttttattcattaaccttcttctggcatacgagtcacaatcaaccttttaattttgacaataatataatagaaataaaataaattttcagtcgtggtaatttctattacatattcgtttaatgtaatgtgttttgacattactaaaatgggatgaaaacatccttttacgagtctatttaatcatacagaaaaaatggcattgaagatgcaattaatgaatggaattcatttgataaatgtattcaatggaaggataatgcttccaaaataaggatggtcaaaatttaactcaagattgttaaaacaaggttgtaatcggagttttccgttttattgaaaaacatatccccttatgtcttatgactattttaattgaataacataattcaaatgccttttgttgccttctatgcacatatgtgaacgtaaatctagcgcatcattttataatacagttagtaggccgaaacatacaagcatataacaaagataaatcaacttcttcgaggaagcatattcccttgatcatgctcaacagtttctaacttcaatacaagctttttttattcatttatttaactatttgttgctacacatactagtttgtttatgtatcatattcattgtcggcatggcaacgtggatttatttacgcgcagcgcgtactcatttaaccagcaccacgtatattcatttttacaaatacccagcttatatcgtagtgaggaggcgaattttgcgaaagaaagcatttctttcattttaatatttattaattttttgtttatttttgttcttttttgattcccctcttttttttgtctttactctttaatttctttctatctttttctcctaatcatattaagcttcttatgttctattcagaggccattctttcaaaaaaggtatgtagtttataagttttctttagcgcgtaaacagtgctaatttgtctttgaatcgtctgactaactgttcgcgttagggtcctttggccaaggtatggttggcagctcactgggaaaagaaactttccaaagtgcaaactttgcacaccagtattgagcaaagcgtccatgcaattgtcacggaggaaaccgctccaatggcccttcgcctatcaggacaactaatgttgggtgttgttcgcatttattccagaaaggctaggtatttattggaggattgtacggaagcgttgatgcgtttgaaaatgtcctttcaaccgggtcaggttgatatgattgaaccagctactgctctccaatctttaaaaggtaaagatgctgtgacacagagcgctaatctcactcttcctgagacaattacagagtttgatcttttggtacctgatagtacatttgattttcaatggtctcaacttcttcgtacaccctctcgttcttcgaacactcttgaactacattctttaccaatatcttcctctccttcttttccatcttcccagctatcaattgaggctggacgaaatgcccaagtagaatcagggttttccttgggcgaatcattcgcacatgttggcaatgatatgcagtttcatcttcccatttcaaattccggtgctgctacacctagaagtgtgcactctgataatcagtcccaaatttctatagaagtaggtagagatgctcctgctgctgctgccaccgatttaagtggaattattgggcctcaaatgactaagtcgccggctagttcagtcactcattttagtacgccaagcatgctaccaataggaggaacttcattggatgatgaattgttggctcctgttgatgatttaaacctggatttgggcttagatgatcttttaggagatgaacaaggtgctaatgctccggcgatagaggctgatgaacaagctgaaacatcaagtattcatctcccttctgacattatggaagatgattcatctcgtcctgcagcagcaggagtagaggaaggtcaggttgttgaaagcgccactgctcctcaacaggaaaagatcaatccacagaaaactgtacgtcgtcaacgtgcaattattgatcccgttactgaattgtcctccaagcaaatgaaaaaacaattggcagatacatcttccatcacctcaccgttatgcttgaatacatcttccatcgtgtttaatgccaccgttaattttactcgaaacggtaaatttaatacttccatattttcttccaacctgaaccctaaagtaaacgagcttttgcaagctgatttcaaacaggcaattctaagaaagagaaaaaatgagagcccagaggaagtcgagcctgccaagcaccaacgtactgatacctcaactgaaaaccaagaaactgctgaagtcttggaccctgaagaaattgcagccgctgagcttgccaacattactgaagccgctatcgctactttaccacaagaaaccgttgttcaaccagaaggagaagctcctgagcttggttcgccaatgggatttcctgttactgccttggaatcagccgatgattcactttttgacgctcctcccgtaatgctggacgaggccgatttgctgggaagcgaacgattggactcttcggtatctgaggcccttcctagttcacaaacagccaaagattctctacgcaataagtgggatccttatactgaaggtgaaaaagtatccttccaaactcttagtgcgggatgcaatagagaggaagctgttcaacttttctttgatgtcctcgttttagcgacgaaggatgttatatctgtcaagcaggatgttgccattcagaacgaaatcacgcttactgctaaacgtggaatgctactttcatcactatgagaggtcggttaatattttttcaaaatccaattagatctataaataagtgtgaatacttacacgaaatagatttttatgacagtaatattgttcattgctttcttttatctttattttatttttggaatcacgagttgtatgtctttctttttccgagttacgatattactgttggatgtatgtaatattatcagctcaacacaaagttatgattagaaatagcttacgcgctttttaatttattctcaatgattgatctatctcttaaaaatcttcctttcaatgcgatgatacgggtttactaggattgaatatataaagacaatatgatcatattatattaggcgtatcttttttgtacccaatggttgagaatttggaagcgaggaagctacggtaacttgcatacctttggagcgcgcccaatctattgcatctctagaaacagaatcacaattaataatatctatacgttttaattctttcagtcctcgtaaaactgctataaatcccgatccatcgagggatattgaatttgaaaagttcacatactttagatttggacaacaatcagtaatgtgtattgcatgcttattttgaagagcaacgttatcaggaatctcaagatgctcaagttccggtaaagatgcaaatatttcaaagaaatggggggccaatgctagcgaatcgtgtagaaccagcttttttagtttgtaacaagaagtcaaaaatttgacaacattatcgatatcattttgagataaacgaagataaagaaataactctaagttgattagtgattccatccggacatttgtagggaataaatatggacataaaattgtagatgcaggattgcagggtttcacaattaacgtggtaagagattgaggaaggaatgctagatctttaacagtattcgatactccttcatcaatgataattaacgatcggagattaattttatatttttttattgcagcaactaggtctgactgatatgaggcttccagatattctaaatatggactggcagacagcaagtctttaagaaattgctgttctttatggtgaaagggaaacttttgatttcggataaacgtcaaagatttaagagccagcggtacagattctgcattaaagagtttatcccaatccatagaatcaaatatcaaatcgggaattaagtcaacaagctcaacctgcttgagtttcttacagcaagataaaatcttagaagctatggaaaatgttataggagtagcacaataaaagtagtgaagttcagaaaatggcgtccaaattgtatacaatttatccgttgactgagtgtggagaggtgaaatggttttgtagactttaagtgatttgactgaacgaagtaaggctttggtaggtgttaatataccaagcttctctaagccaattacttcctgtatattgtcttttgaataaacagagtatcgagcaacagccataacgtttcgatctctagagtttacacttcgaggagaggcgcatgaaaagtctaagcaacaaaataagctaggttctttcttaatacagtctctccagtgtttgcagacttgcatacactgaacaatacttttgaaatttagttgctgtagaatacataataggacttctcggggaagaatgcgaaacaaatctagtaccggcctggtccgaagaattctttcattcaatctttggcttactttttttaataccggtctcaagggatccattttatgcaccattcgcaggccttgcgtatacaattgatctgctttcttatcaaagccgtcaagctgtaaaagttttcccaagcgtaggtaacctctagcatttcttgcattcaaatgaatcatccgtttagcatcaagttctgcttgtgagtattgacctgacttttcgtaaacttgagcccttagttcaaacaagtcaatcgtaggattgggctcctgttcgatggttttagtaatgaatgtcaatgcatcttcaaacttccttttagagagatattgctgggtcttctcctttattgcttttacttgatagttattcatgaatccaaatcttaatttctatacccaacgatttattttttctatacataaacataaacctcccatatagcttccaatgaaccgtattttaagaacctcgatatcctttttgaggtatatattatgctttcgtagtcgcaagctttatggagtaagttagaattgttaaaggatagttaaagctagcgccttcaaatttcatttaaacagaaattgaatgtgcaaaaatactaataataagcatgtaaccaaaagtttggaaaaaaaagtatctacttatttgttatgcttttcatatgttaaaacacgtaaacaatctcaagcaaaattagcatacggtaatcgatcaaaaaatatttgggtttaactattgagtacaaaacaataaagtgattaaaagataaagcaaggatagcttcttatatggtgtttactattttgcactgaagcctataccatatacgactcatcgaaaattaaagtaatcgcactcaacagcatacttctttacattagctatgaaatttaatggaaatcgagaacaaatcgaaattatgcagttttcgcttttttttcagaacccagtaggaacaaatgattcattagcgccaaatatggccaacatcattatattataaagagagtatttaggcagctgataaaaatatttcagttgtcaggttactcatttaaactaattttgttttttggcagaaggaacgacaggtttagcgggtttttggagaagccaaattccacaaaataataaaaaggcacccaatacagagaaacaagaggcatagtaaggataggcgtgagggaggaatcgagggaactcattatgaaagaattgacgaagtgtaaaggtagatttctcttcaataggagtaaggccaggacgcttgtattcgattttaaatgtaaagtcgccgtagtggtcaggcgcaactaacacagcttcataatgttgagatgtttgactatccgatggaactggaacgagattgacacgatagtaagggtccaacatgataagttccaattgaacatcatctgcaacgtatggagtttgctgaccgtcttctaaaagagatatgtcgattgagaaaatctaaacgttagtactcttgaaagagataaaatattgtgctgctcaagtacgcttcaaacaatatacttgctaaaattaaattatgacataatatcaataaaggctttttaaatacaaacaaaaaacttaccatttcatctttaatacgataacaagaagcattgcgagactctaatggctcagcgacctttccataagtcatgttagtggcctgcaacacacccttgcgctggaaaacccaatttgtcaaatcacgagcaaaaagaaaattagatttggaaaacgaggggctttggggagacaaatattcatcttttaacatatcgatactgccactaagaccaacacgttcgccggtgctactttgcaaaacactgaccaaaaacagttgagtgccagcagcccaaggattctttgagacctcagcctcagttttggtgttataaatataagaggttggattaccacgaagaataggttgtgtctgtggatttggacctaaataatggccaatccctttatataaaatagggccagcagcccgggtctcatcagaaatgatatatgggttttccgatattccatccaagagaatgatatcgtcagaaccttcagcgtgattaaaatgatcaacaacgacagattgacgttcggccagaaacatatccagttgtcttccaagctcccttattccttcgggaagttgagagcctgcaacaacaaacaagttaccaccgctttgaacaaattctagaagagatttaggggagaaaacagggcccaaacctattcataaagtgcgttagcgtaagtttatcatacacattttctaaactgaaatcatgttgatatcaataatcataagccacatacttttactttgagatgacaataagatcaagttgtcgtaaagacgttcaccatattcaaatagctttgcactttcatctttgatgtaagaagttttcacatcaaaatctctgtctacatagtaacagttagttactgaacgcgttagtcaatatcgtacccgtaagtgattgtaaaaatgtgctatatccaccgatatcatggtcggcaacagccaaaaccgtctgacgagctgcttgtactaaaagcgaccatgtaagggccaaagcaatacacaatgcgctcttcatcgtagctgtgtttccaagtgcaaatgttggtagaagaagagatcactggtattaaccaagcatagctacctccgcatactggtgcttatgggattgcgttgaactaattaacgatatttttataagagcattcaaaataacgctaaactactttcaataacataaagacacgtaaaaatttactcaacagtacactattataaaagtaattcgtccaatttttatttgaaatcctaaattccatcgattgaaatgaatttaaattctttatatttctattcaacaaagaaatattctcggtaataaaatcagcgttagcttagctcccctcagcaatgctttatttagcaaatttcttaacattggaataaatggcatatacaaatccctcaagaagtcaaaatgggttatttccttgcaatataatatccagttatttatatcagcttagcaaaaatagacttgttctattagcttataacaatgatacgacagaacccatgacatatcaataagataacaaaatatcaatgtcaaagaataaagcctgcttttctaactaattgcaatcatagtgtgcacaatttttaaagttaaacatctaattaaaacgaagtgcgttatctacgttgacagtttaaaaaatcactaaaatgcaatagtctaaggtaaagggaactgctttttgggaagaggaagagtagtgccgctaaccttgatgcattcttgtccaagccaatgaccgagagtaacagcataatcgattccttggccttgagaaagagcagcaataaatccaccagcaaaggcatctccggcaccattggtatcgacgatttcctcagatgggacgcggttgggcttgtaagtggttactttaccgtctttagcaacgatcgtggcatcggctccttgagtaatgacaacaacacgggtgcgtttcttgttaaccttctcaacagaagacaaggccagcgcaatctcctggacgtcggtacttttgattccatgattctccccgtagctaaggatttcagcttcgttgccaataacataatcacaatatgggataacggaatccatttgctccttgaaaaattgagagaggaaaggagcgctaagattcatgatatagggcttgttattctcattagcatgttgagctaaacataacatggattcgggactgacggtcaagtgaaaaccaccgacgtaaataacctttgcttcctcaacgaacttccatacattcggctgttgcaagtccttgagcttgtagttgttagcagctcccaagttggtacaaagggagcgatttttattgttgttgctcaagacgacagcacaaacaccagtaggtgtagtgggatcaacagaaaactcagatcgtaatccagctttttcgttcgattcaagaagcatatcagcaaacttatcttgaccaacgcagccggcgaaaacagtagagttaggaggaagtacgtattgagcagcacggcagctgttttgagctgcaccaccggcactgtagctaacgcatggctccttgtagatacccatctggctctcagaagctaagacggcgtcgttgctcttcaagccatacttttcaagagttgcagtttcaccaccaacatagtaatccaacagagggttttccaaaccaaacaagatgtatgaagacatgataaatgattgtagtaagggaagggaaaaagttaaagaaaaaccacgagaaaatacaccaacaggtaaagtatcttaatgttcaaagagcgatattatggcataattgtaatgcgttatattattaatactatactgcgttaaatatcgatacatgccatatggtctgtttatctttcgctatatattgtatggtaaaggcatactatttttaataaactattaaaatttgagcagctaaaaaaattatcaatataagcataactgtacaagcatcctcaatttcagttattagctatattggtgaaaaatataatactatgtaactgaagattgacagtgtatgttacttattgtacctgtatactggaattctaggtcacaactaatactcatcgcaattttaaccttcattaaactgattgcaaactgcataattaaacgatataaactgtatcacactcctttgcgcctcggtatattataatcacaatacttatttaagaaggccgatcacgagaaaaattagaactaataaagattaaaagagtcgatatttgatgctatatacaattggtcatgaatattaactccattcctgtattatttttttaacaaaggggttgcttcaacttttagcggaaaacttatcaaagtgtggaagaaataataaactaagataaatgatgatcgagttgcactgcgtcagggtagccggttgtcaaaattttcaatatacgaataaagaaataaaaacaaaaatagagtgaaaaaaaaatagatatcggcatcatgctaaacgtggagacgatgatccgccgttttttaggataaatttaggatatgacaggagattacaactaaagaacttttggtgcttcttcaaatatcctgaataaaaaaggtcgttaatcttcaccttgaacattcgctttcttttccataatagcgctaacaatatctatggatagtagctgtaggtttaaatcgttgatcaattgctctggggctgtagaatcactttcccatactaataagattagaatttcttgcaaacgctcaaagctatgtcggagattagcttgatcattggaaaagatagtaattaagctagaaatgtcgttttctaatgccatagcaccataatcattccactgaatcttatatagtatgaggttttctatataacttgcagctttctcgcatgccatagagcgtaaagaaagctgattttcaggagtaaattgctccagcaacaaaaccctgtcccaaacgctgcgaagacgggtaactaccagtctttcatgttctgtctccttcgtatagtcttcataggacaagacatagttgattccatcaaaggaatcatcgatgcattgctcaattcggggtaataaaaatatcggaaagtacatgttgaaagaagtcttgcaaagattttcaaaattaacggttagctgcaaaaaattatcaatcgatttctttaccaatttttggtctttggcaaaggcaaaaacttcttccaaccgactagaaacaccatccacaattgattttagatattgcttgctgagtgaagcactatttaccaatgttatgtagttttcgacttgtttggcgggaatgctatttgcattctttagcctctggaactgagcttttataatgttacagacagttaaaagattatgggaaaggtagacatagtaatcatttcttaaaatagggattaagctttcgttaacaaatctggtgaagaataaagaggagactgtaaaaaacgcacgttggaatacttgcttcgtaacgtacatgacatcgtctacaatagagctcatccatggggaaacctttgtgtaatattcctcaagttccaaagacgtttctatacttctcctgaaatagtatgtttctaattgtaataaggatggaagaagttgcttttttaacagaagttccatctttgaagaattgaaaatagatgcacaaataagattgtcctggacagatggatcattcgaagtaccatcagattgggacaatcgaaggacaagacggctaataaatatttttgagatattccatttggagacaatggctgacatttcattcaaaatcggatgtagcgtttgaagagagaccctttctaattccttttgatccgaaacaaaggcacgatttttcaacttcgcatgtaacaaaatgtatttgtaagaagctatagagcttacgaggttatcaattcttctcacgtcaaacatggtattcacgataatggaaccttggcgatcacaatcaccttgcaatttttcaataacggtgatggtgtttttggccttgtaatatttttgaacaagaggcgtatgtgcgcgtatgatagaagcaacatgctcgaccagtccggtaaatgcctgtgcaaaaaaaagagcatgagtagggggctcatcgagagtggccctagctttagaagcaataattccaccaaaaaaatgccaataagcttctaatccttccttttctttgccgatcaaagggaagagtttgaagtaacgagtgatttctttttgatcctgatttcgggcggccttatggaattcccgccaaaagagagtgtgtagagattcggtgatttcttttaaggtgtccatgggcgctaaaggttgctcagctgtgggaacaacggcatgtgcaaatttcccttcgatgatagccggcgatgtggagcttgctcgatgtactaaatcagctgctttttcccattgttggtgatgcatagctctgttgagatcctgcaaacattctttgaaatctcggacttgacgaacaaataaaagacactcttttatacgattctgttctctatcgaccgatttgattctctcaatgacctcctcgctaacgatagtggtattgcaaaaagcatctttaagctcttcaatctgacctacaaacagcactagacgttctgccatattcttgattaaagaattgaacttctcagtcggctgtgcatcgcttagcagcctttccagcttttcgtcggttcgttgggattcgacttgtaagtcatgaaaccgttgtttaatttgcgagatatcagtgcagtcattgatggatatgtccattgtacactcattaaataaagaaagactaaaacgcgttcgcaaattatctcaaaaaatctacgaggttgtgaatattaaccgcgcaaaataacaattaaaaaactcaaagtaagagtgaaagaaaccaaagtaagggttgtcgtcagttgattttcgaattaattaatttttaaataaattagtaaaccttgcaacgtctcccattcaacttgccaaatgccgcacaattgactcctactaaaaaaagagttactgagtgcattgcaaatggtcaactttacgatatcatactattccagtaactaataattaacgagacgataaatatcattatttgacagaacgcaacatcgcagactctaatagcgagagttcgctgttgttctttaaatgtttgatgtgaggcaggaaatataggagagtatattttgttgtgcaatcattcattcttatagtacaactgtaataaaaagtcatggaagagcaatttccaaaagctgtattttaaaaatttacggttttctgctacgcctcgttgttaaatacaaatccatgtttttcgaaatttcagcatatttgtcaccaatgtgatggccaaacaacaactcacaaagaaggtagtctatgttaaacatctcagttctacctaaaacatactcatgtatacccccttctaagaattgcttctctttttctttatttatttattttcaccttgaatcctttactcgatttcccactgctgtaccaatattcctctcctcgtccaaacaactagatctttatggaagttactactgggaagcgaatattactaagacattacaaaaatgtgtgtactattttacggtcgaattggtcgacacaaagaaatggtaaaacgcgaccgacctactaattaattctaaaaaaaatcatcaaattaacaattggtatttgtttgatcataacgatgtatatgaaatgtcataaagtacttgagtgtagaaacgcatgcgtgcgacgagtgacgagctcaactataagcaattgatatggaggcgaaactttctgtaaggagagaaatctaatccttcttcatagtatgcatctcttggtcaggctcaaaatgttgaatttcaggatgagcagacaaagcatctactgcattctcaggaagagaaacgctgaatcccttaaatacggtatcataagtatgaccaattttagcaccagatgcctctaaatcagattttattttatccatcgatgcaggatcaacagaatctttcaattgaacgatatacgacttttgactcatggcgaaataacgaaggcgaaaaaaacaaggaaagtagcgtttcagattttttagctgtacttaaaattcacttaattgtcaaaaaatgaacaagcttatgtagtacagataagaaggaattgagcgcaaaggggaaaaggctggtttatatagcattcgccatgtgcattacgtaggtcagcttatctaaatagaacggttgtgcacattgcttgcttagccaatttattagctctttctctttcagtatactttttaacgaaagtcaaaagaactttggtaaaataaataacaaaatatatattacattttcgtattgtacattgagaaggctattgcatttgcatatagggacacaatattcctcattattcctttttttcacgcagtgtagacaacgcggtctggaaaagacatacatccattggaattgagttgtatttttgggataggcggttgagtgagaatgaaattgagaaattagatgctttaataaccagtgcttttaaattgcttcttgctttttgatcaacaccgtgatttcactcctgcgaggtacatgttacctagctttgatctaatttgaaaagttggactcatggatggtaaagagagaaatttcgttttatccatacttaatcatagtatgtctctcacgcatactctcacataggtagttaattgggattctcatttgtttaaaatttagctggtttgcaaaggaaaacaggttgactcctgtcttttttgggtctttgggatttcttttgtttttgctttttcgtctctggttttgggtattttaaaaaaatcacaatgattttagaagacacggatctacctttaagtcacgaacagccttcttactctcaaattaaagatgttttggacaaaattcctactggggagcacttgtgggaccttcctaagtatgaggagaaaataatcctcaattggcttatcaagctcttagctacaaatttggaatggatcacagttgaagaggaacgagactatttggttagcacgatttgtgaacgaattgcagagcgtagtggtagacttgcagctcctactaggaagagggaattttccctttcaaatggtgtttctgtagttcttcgagagcccactatgacctataatactttaggatttaaaacatgggggtctgctcccttgctttcagcaaatcttcccaaatgggaagatttgagtaattccattaacgcgctagaattaggggctgggactgggcttgttggcattagtgcagccattcaattaggatggcaagttgtatgtacagatctaccagatatagtagaaaatatgcagtataacgttgattacaattctgaacttatccagcaatatgcgggttcagtaagctgtcatgtattagattggatgaatcccccagatgatgataaccgaccatcatggcttattaaaccatttcaacggattatagcaagtgattgtatctatgaaactcatttcggcgagttagccattgcactgtttcgtaaatatttagctaaggacgggattgttatcacagagtatccacttcgcgaaacacatttggaagaaataggtgtgtttgaaaagggaatggacgccgccggatttgaaagacaaatgggagaagaaattggtgaagaagactttggctctctatacccagtaacttgtcgttggagtagatggaaataccatggataacttaaaatgtatcaatctataggtcaaaccatgttgcaaactagaaaaagcgagccaaaataattgggttttattttttccttgtttgaataattttagattttaatagcaaagcaatagattcttttgtattatttacagtatcaaagggaatcacttttggttttaaagctggctttttgagcccgcttttttctgtttagaggaacgaaattgcgtaggttggtttagatcaacaggacatcgatactgaattacggtttagtagaaaatctatttgagaaagttaccgattgttttcttgtaaatacttttttatccttccgcgttcattcaaagcaacacattagtatcgtttcgtctctatgagctttcatagttattttctacaaattcaaacggaggactagaaattagaaagtagaattaaccataaacatttcacttacccttcgtactttcgatctttaatcagcatgcgaagctaaaccctaccctaatttctccgacagtgtgccaatgggactcccgaggattggcgttggccttcttccttacacacccaaattccccctctctctataattcgatctttttagcattaaattattgaattaagctaataattatgtatctttcaaaaattatctgcaaaaaagtgccaatgaagcttctctgcactcgcaatgctgctactgtgagtgctgctgctaccaacgctttgcagaaagagcagccttccggagaggccatgatcgctcgtcctcgtttggttgatttggacaagcgttggggtattatgtctcaggaggagaaagacggtcttatcacagatttgtatgctcgtcagaaacaaccctggacgacactctccattgaggaaaagaaagccgcatattggattgcttttggtgaacacggtcctcgtgctttcagccacattagtcaaaagacagttttttggggaactgtcgctggtttaacgatcggtgtcgtattgtttggtctcatccgcactcaagctgctccttctcctcgtaccatgactcgtgaatggcaagagaagtccaatgagtacatgaaggagaacaagatcaaccctattagtggtgaagctagcgaagggtttaagggacgtggtcaaatttccggtggtattttctccccctccgaaaaggacaagaaataagaaattcccacattttgagttcaataaagtttcagcatgatctgggtttctttttgcttagtcaaatgaaaatttatttagttgttttatttcttgagcctaactcgactttcatggtaagatgctacttcgtcggacccaccattatcaggtactggaaggtttgactttgctacattcgcttcttttatttctaaaaacgagttttaatttatccccctttctaatgaaaatttcagcttatcgtgaataagtccggaatatagtaaatcgtaaattcattgctttgctgaatgtagttgattaacaattggggtagtgaacgctaatcgaagttcgaatgcttattgtaacgttgtaagcttcatgctaatgatctctgaatacatctatgtacacggttggcgtatcaatttatttagacaagttgtcattggatgaagtttcacaatcattatttagttttaatctacaaaatcactttcccaaaaaccatttggaataggtttggggatgtttaattttcgatgccggcctactttttgcaccaaaggttgatgcttacaattgggtaaagagccaccacccaagcggttttcgtcattccaagtaggcgcaacgctgctttctttgactggaccatgtaactcatagaactaaaacaccaattagtagggaaaaaagccaaaaatactcttaccttttggcaatccggacattcgtaagcaggaagtgctttacgtttattacctcgaataacatcatcgtttaaaaattcaggctcaaatggtcgcttcttttcagtcccctttttctggcgattgtcagatactcccaacgtatttatgtccaacggagctaatggttgtgtttcacgtagcaatatcatgtcttcaggtgaccttgctcgtaaatgcatttcaccgtcggaactttcaaaggactctgcgcctataggatttgtgtccaaaaatttttcttctttcacgttacccaatggcacagaaattggtttgacaaatgctgaagcattttgcacaggaagagtgggtgaatgcggagggattttaacgctttggtttttctctgaaaaaggggcatttaaagaagggtcctcttcgtccactgtatcacttccaggaatctcatcctcgtctgttgtgctatccaattcctgaatggtatttgaactaactttggaagacgcagatgaggatatctgttttgttttaacactttccaactccttttcaacttgaatcctcagtttcttttccaagaccaattgagatttaagtctagcaatttcgacttcatattgctctagaaggtttcctaactgacgataaacaatgctccaatggaccgacttattgtgttcctcctcattcatacgccaatcacaatatttttacttaaattattctttaagttgttcagatgaacttagggattacgattgaaacgttgtagggctgcttgcgccaaaacagaattctcacgagaatagtatgcttctgtatactttgcttcagcgatttcgagctcctgcaagcgtttctctctttcaatatgtaatgaatgaaatactttattcgtaccgtagtacgaattgagactaaaactattactctctacccgcttttcaactttgggtcgtttcaccccaatttctccttcaggagtgtcttcttcgacgaaattctcctttcttttaattttggaaagtttttacacttgattcgtgcttagaatgggtttttttttgtaattgtaccacccaaacgttggtactttgggtttggcagaaggtaaacctttgtcagcactcgtcatttgtaaacaaaaagcgcgacgcgactaccatcctaatacggcttatatcgttaaattacgctatttcaaagcagtcacgattttcgatatataaaagagatagtacctacaataacagttctttaacaatgtcatttgcaacccaccgagtcacggacttggtctttaccataccgaggatgcagctgtcaaactgcccgtgctatggggtgcaaagaatatgcgcctgaactcttacgacctgtagcagtactttattatgtcgtacaggatgagaggacggcctacatagctttccttttcagttatcctgaatcaattgaaaatcaacttttagttatagttaaaatgagtaggttgaatttttttatagaaaagagtagttaataaaagaaaatgacgataatggatccagatggtacaattttttattattcttttgtttacggatgacagtaaaaggaatgtaattttggttgttttagcttccttattgttttcgaatacagaggtattctaatatgcgaattatgttgtacctatattactgaaatagctcattcatgagggacgtggtttagtacatcccacttatagccttgggaatgctataattgtaaatgttattttacagtatcgtttaactagtaataagtatctgttttggtagctttattatgcaaagctaacagaatgaattaaacaccgcacataaaagtgatatgcaaaaacgtaatacaatgcaatacagtgtagtatggctgggataaaataacagctgtacgatgctcctcctaataaaagtaagcaataacaagaatacaaattgcccccactcggaatcgaaccaaggatcttcgcattacaagtgcgatgctgtaccactaagccataggggcaacgttgattgctgcagatttgaagtaacatattaataagtagatatttttgtaagattccattaaaagagagtgatattcattgtttatataaaatactattgtctgaaagataaagaagtttttataaattttttctttttagaaatataaattatagtagaaaatgtgaaactttttcttgcgcgggatcttgcacttcgcaaatctaaaaatcagtattcgactctttaagtctcttcaatgcttaatttaccataatttctcatccattgttttttcttagataatgagattcatccagcgttctagttaatataaaaatctttcttcacttgaggatttgaaggctaattacggtacctgcttagtagaatacatatcgttaaattaaagaaacttttcttatagcgtatttgatacttttcgtgtgttgcaattaacttgttaattgcaatttttttgattaaaaaaaataatgtatccttcgcattcgaaaggatatttcaaatttttgtgcaatgcatctctgtttgccaaatacttgaaaagcaacgagttcttcttctactgagaactccgcaaggtaggtaaatctcgtgtagctgctaaacaaatcctacagataagaaaaaattgccattatactttttttctgtaatatttttaaaggcacaattatccaattttgtttaacagaactagtgtattgctagatgaggaagtctgtagaaatgtgaagtcgtatcccatagtatcaggaattagtaaatttaagagattttcaatccactgattgttttaacttctctagtttgtaatgtaccttttgtttcaaccttggatgttgggacgtttctagttgaggagtgaagctacgaaccgttttaaataattaagtggtattgccaaataataattagtttataaatatactggagtatactggttttctattcaaaagattcccgataaactttgccttacagatatgtaataccgtgtccccagtaattgcaaacaactagcaattgaaccaataatgaaaattgatgtagtcatttggttcatcgatactggccaaaatacttaaaaatagtttgtttactctttgaattttcgtattttcatataagaaggacatgcaaaaattgttctcgatgtgccatcttttcatgtttaccatccatcgtccattgcatggctattcgataagtttccataaacgattttttgaatatgtagtactcagcgaagtatgaacgcaatgtttgctgtctttttctacaaaaccatttcttccaggtctaacattcaacgatacgagataatttatgaatcaacgtctttttataagcacaagacaaagagtaatgaagaagaaagcaaccttgcaatgtggaacacattaacgaaattcattccaagggttcgtactcttcccaacctgtcctctacacttacccatggccaaagttcaactgagcccgaaggagattaccctttttagaacagcattagtatgttaatcttctacaattaacaaattgaaaatttctctaaccctgtagaaatgctatgaaacaaaacagtacaaaaaaggattaaaggctatcgaacccctgttagaaaggcatccagagcatggagaatccttagcaattaagggaattttattacactctttaggtaataccaaagaaggatacgacaacgtacgacttggtcttcgcaacgatgttggatccggtgtttgttggcacattttcggactaattagcagagccgataaagattatgtacaggccgctaaatgttacattaatgctcataagcttgagaaaaacaactcgagtcttttgcgtgacttggcgttactccaatctcaacttcgtcaatacaaggctctagcagacactaggaatgctttgctgcaggacaatccaggagtacgtgccaattggagcgctttagcagtagctcaatttcttcgaggggaatacgctagtgcatataaaatagtggatgcatttgaatccactataaatcaaggtgtgcccgttgatacccaagaagaatccgaagccatgttattcatgaaccttgttatattaaaaaaagatggtgttgaggatgcctataagcatttactgtcaatagaaaagaaggtattggatcgggttgcgtttttggagactcgggcagagtacgagctttatctttccaaaatggaagaagccaaatcaaccatatatcttctgcttgatcgaaatccagacaatcaccaatattattataatcttcaaagagcgtatgggtatgaggatgccagtggtaaagtattggatagtgctgagtggttgaatttatattctcaacttgctaaaaggtatcccaaatctgagtgccctacgagactacctttagaaaagcttgaaggggatgagtttttaactcatgtagatctttacttgcgcaaaaagcttaagcgtggaatcccatctgtgttcgtcgatgtcaaatctttgtacaaagataccaaaaaatgcaaagttgttgaggatttggttagtaaatacgcttcctctctttctacgaccaacaaattttctgaagatgacgataattcacagattgaaattcccaccacgcttttatggacatattactttttagctcagcattttgatcatgttggtgagttggaaaaagctgagaaatatgttgatttggcaattgatcataccccaacgcttgtggagctgttcatgacgaaagctaggatttccaaacataagggagagcttcaaactgccatggagattatggatcatgctcgtaaacttgatctgcaagatagatttattaacggcaagtgtgctaaatatatgctccgtaatgatgaaaatgaacttgccgccaaaacggtatcgttgtttacacgcaatgaggctgttggtggtgctgttggcgatcttgcagatatgcaatgcctgtggtacatgcttgaagatgggaaatcatttgctagacaaaaaaaatttgctttggctttgaaacgttttagtactgtttttaaaatatttgatacttgggctgatgatcaatttgatttccacttcttcgcatttcgcaagggatctcttcgtacatacctggacttaatgtcttgggaagacagtgtttatgacgatccttcgtttagagaggctgcccaagggtctattgaaatctattttgccttatttgatttaccatttgctaaatatagccctaaattacccgattttgagaagctttctagtggagaaataaatgaagaagaggaaaagaagatatacaagaagctgaagaaggaccttagtaaacgattggaacgtgctgagaagctaaaagaggccgataaatctcgtgcaaaatctgaggacggtatgccggtaaagtatgatgaggatcctcttggggagaacttagttgctactagtgaacctttgaaagaagctcaaaaatgtcttgaaaaattactcccctatggagataaaaacccaagtgcttacattttggcggctcaactttacactcgtttgaaaaatttcgataccgctagtaaatacctcgaacaagctaaagtaattttgggacagaatgacccaactgtgatatctacagagaagttttataactctatcaaaactcagtctaactaaaataaaaggttttttactttttgtacaataatagaagctgcaaaccactttgtttaacaaattagtatggaaaataaaagtgcatggaaataatataaagatggtattttcattgttttgtgcaccccattgtaccattgaaatgtcttgttttattatattgttacagagagaatattctggtatatttaacaaatcccggtttttgcctacgcatatatatgtagcatcaccaacccacacgtacttaggatatccgaaacgcaattgtccttcaatttgcttacgctttgattaattattactcatcttaatcaaagttaaatttttatttcattgtaaacacatttaatatgttgtttgatgcttttactaacggatttatgaatgatatttttgaatttggtgaccgatcgaaattcaacagatcggcatggttatcgtgctggggcccagcattggagctaagagaaacagaggatactattgaagttgatgttgaagtccctggaatcgataagcaaaaccttaaagttgatttacatggatcgaagttgactatttctggtgagcgtaaaaagccagaggaagaaaaagcgggccctcttattcgctggagtgaaagatgtgtaggtgctttttcacgtacgataacccttcctcagcctgtcgatgaaaaacttatacacgcttctcttaacaatggtatcctaagcattgttatgaagaaaaagaaccctgagtttacgacaagaattgttgaaattcagtagtttcaaatactcaatgctaatttaaactatagcattgtctttttttggtcctggcattttaatgcttgttttatgtttgttcaccaccttttttgcatgacatccgataaactgcatgtaacagataaaaaccaaagtactaccctcctttaagagaaatttgattattaacggctatatattctcaagcatggcttcatacgcttggcatcgatttgctcaagtatcaggcttattgctaaataacggaggattaatatattatgagttctattcataatctatgaaagtaaatgaaaagctatttttctcccttctatctgaaaatgggatatcagactgctacaaaattaaataaaatattggcaagttttacgttatcaatacactacagaaataggataaattctaacaaattaatgatttgtatttttacatttgatatgtttttagaatacatcgttcaaaggatatttgacttcacttttgaccttggcaaaaagttgattttttatctttttccaatgtagggaaaaaatattgaaattgcagcctgtgacaggttcactaaaccagtattgaatattctataaagtaattgttgaaatatactttgacagattgctagccttggttcgaatgttttcgagacccaactttaaccaaatgttacagtaattattgatggttttggtatctatcctgtattctttattcttcgaatagtttcgttgatcgaatattagaaaaatttattctctgtaatcatgcatttgtatttgtaatgtattaatcaagtaaggaagagaaggtactcacggatctgctaggactattaatctagacacaatttagattcaaattacaataattcaatataaaagcaccaatttgaatcttcagatcttgttttgaaatgatcaacaaagatactgtgagatccgaatgcaccgcatccattaaccaagtaccacaaacgatggcaaaagtgtatgattagacatattaaagtcgataacaattactaattttgatagccctcgcaattttaaattacttgaagagctagaaaagggcgaaaaaggcctcggagagagttcttgctcatatggtttgacgaacgccgatgatattacattgtccgactggaatgcaacgattttaggacctgcccatgtatgtttctattggggtatatttcaagtgttaaattgatgtaaaaaaaatgaccggggactagctttgaaatttatgaagactttcgaatcaatacactttgaagcttatcctgttttaatacttttaactttcaatttgtactaatttgttattaatttagagcgttcatgaaaatcgcatttacagtttgaagattcactgcgatgccaattaccctgatgctcctcccatcgtcacgttcgtatctagaattaatttgcctggagttgatggtgaaacaggaaaagtatgtgtatattagagaaagtttgtaaaatacctcatgttctctgtaaattcttttcatagcaaatatcagtatattgtatgaaaatgagaatttggtgttggcttaacgaagagaagctaattttacgcgaaataaaaaaatcaagcttttttcagttcatactaacgttaattaggtaaatccccacaaaattgactgccttcgccattggaagagagaatactctatggaaactgttcttctagatttaaaaaagtatgtctattaaacttcgtatgaatgatcatcctaacttatgttttagagaaatggcatcctcttccaaccgaaaacttcctcagccccctgagggtagtacatttttttaaagcaaaaaaggaactctcatagtacagaatctttcagctattgttcctattattcgatcgctgatggtggccttcttagcttacattatccatagtttcgacactatgtgtattcctattttccttttttgctttctttacatcaacgatccttaaaacatgcaaattacattacaaaatgataacttacaatacctaaagatattaattctatacctgtatttgacattttggtgttgtgtatttatgtgtcggaatttttattgtaaacatttcttttagaatcataaaaaaatttgaggctacaaaaagtaattagtctttataagtgtctctccaatccttaaacattccaggacaagcatttgtcagaacttcccacgtttgatctcgtatgatttgttcgacagatagttcactttgtaagacaatttgtacctcttccggaggggataattgcacttgcacctctttagcgtaaggatccaaacgttcggaaacctgagtcgttgatgatgaaggcaattgctgctgtgattttaagggtgatttggaagtatttcgatcttgatcaagttgtgatcgtacaatagtttgacattcttttaagaattgatcccgacttaaccaaccttcgaacaactttttctttacgttttgacaacgctcttcttgggtttcatgtaccttcccttctgggtattcccattttgctgaattaagagataattggatggtatcgtctatctttctagctttcctcaaaacatctaaaagtatgattagtattggatgaattggttgtgtaaaaaaaacagtgttcgcatacttttcaaataccttatattcatgcaaagaccccgtttttcttcattcattgtgtttaatatcaattttgttttcctaattaatagtttattagaggggattttggtttttgaaagaaagactcagtcgcctggtaaattcgttctttgtatgtgtgtgctaattaccaaatggggcctatttgattgaaatgtagctttcggctaccatttgggatatcaactagaattttcaactttcgatatttaacatttaaaaaaacagctgataaagtaaatgattgcgaattggcagggaggattttatgtagactaatacttttaccattgtgaatatgatatgcttaacaatccaggtgaagttgccttttatcgagcaatttattttttaaaaatgtgcatatgcttgaactcagcatatcattttaccgagggtctgatcatgacattgacaatttcattcgtatacaatttaattctcggcaaaagcagtttttgtgtgacaaaaaatttcccctacttcattcatatttgtatgttctcttgaaatcaaaagacaacctgtgtaatcgtttcattattggttttcggtcaaaggggccaaggctatatgcatggtcatttcatcagtgttttcagcttttgcagatataccatctgtgtacctgatttctgtgaattgtggagcaagagaattatggctcactattacatcgatacatttcgtttccttgagagagcagcgatatgaatttttggcgaacagtttgggagaaagaacatcgtcgctcaaatcacaagaagaaatggtttcagtatctagaaatggaaaacaacttctctctgaagcttccttcttccgtttgggaaaacacgtgcatcttaattttttgcccttcgagaacacttttgaaatggcattgaggaatgatttccaaattttctgcacttccatattgtttacttgttatattcaatctttttctttattgatttcaaacttttttatagcgattgaggtttcaagatcttttttctgacaaataaaaatatctgatcaacgttttcttggatagtgattttttttctttttcaagaaacaggatgaaaagattctcttatctgttaagcatttggtggctttaatattctgtaagtttaggtgatgaggagaactgtgtgtttgtttaccttggattaatatgtaaacaaaaagcaaatatgttttaatgagccaattgtatgatcatccttttgcaaatcagaaacttttctttttctttaaaattgagacatttattgataaatgtgaagggaaactacaatttaaactgtttatccataagaaccttctttgagccgctcttctacaatcagttgataaaatcagggctgctttttaatgaaaatattttttttgctttctttttatcaaaatctcttcagagtatcacatactttcataattggatttacttaaaaagaggaattgatagcttctgtttataaataataaaaaaaaaactataagtattaaatagttataaatttatgtatagaatttcttttaaaaaaaacagttttttacgaatttctattaaaaagggcttagttttacagatgggaaatctaactcgcatgagaaataaccattcattatagtatgactgatttgatgtcgaaaacgaggaattaaaataaagcagaaaaagcaaaaagaataaaaggaagcctacagcaccccggattcccatgttgtctccaaccatagtactaacgaggccctcagacgcttaactgcagtgatcggacgggaactggtgttttcgcctaggtatggccgtagacatttgttgtgttaaataatagtatttattctgttattcaagtaggttaactagtgagtagttcatagaaaaataacttgagaaatgacaatcttgatatgaatgatcattgaaataatttgaaaactaaaaaaaaaaattgttcagattgataggaatgctacgttaacaaaaattgacgatttactcgctcagacaaaattgatttttatatgcattctcaagtctagtgaactcaacagcgtctattcccggcgtctctgagtgagttaaatggttttagcgtagcaattattgttttcatttttaatggtactaaccaagtatatcagttttataggaaaagtgttatttgcaaagtaaaattaatcatttatctataaattgttttaattttattgataattcgagtgctatcaaaggttttataaattcatttagccatcgacttggtatttgcgcataaacaggatgttttaatgaagtgtgtattcttactatatcacggtagaataaaatataaaaatataaaaaaataagtaaataaacaaaaaacaatttttagattactttttattatgggaagctcttgctgttctacttagtctttgttaacaaataaaaatgcccaataataattaagatttatttgaaaatttgaaaattctcagttttcattatatataaaaaattgccatttactagttgaaaataacataaagcaaatctttatgtcttttcttagtgatctctcttcctaatgtctttttcaattttgcatgcttcataaacaatgcaaatcacaatatttacataaaaagagaatatcataaccaagacaatctgttcatccacaatagctttttttaaataatacatgtaattttacttttcttaatttatgggtttaatctacggtttttttagctttgctgtatctgcacacattgtgacaaaggccatacatagcgcatgaaaaaacgcttaagatattgaaaagcccaatgcaaatgcaagatctaccataagctttttgcattttagtattggaaaacatgagtagcttgttttttatggatgattttgattcgcaatttttttttataatttggccattctcacgattagcaagtacaaatgaattcatctataggatgaaataagtgaaatttttttgattaattagcaaaagtaaaagcagaaagtgttttcaaatgcgacagctcaatcaggtacactaataatacctatcatactagcaattcatctctattaatcacgggcaatcaaactacttcattttatcggcacagcaatagcatacttcaaacatatgatgtttttcggacttttctttttcttctatttacatacaattcgtattcggcgttttaaaattgatgcatcgttgtaccgttataaaaaatactgttccccaagaaggcacactttgcatatgtagataaaccgagtgggctaaaagaaggtagaaggcatcaagtattcatacacaagcaatttcttttacatttcccagcgatttttaccgctttacacttcttacctcgaatttcctaaaaatctcataaatctttgtaaaacgattccttccgtgcatcactaattcatttagcagatttggacaatacgctattctacatttagccatacaaaagcatacaaattggcaagccccacaggtgcaaaaatccgggggctaagactgtgacgaaaatccgatagttttcagtggtaggaagaaaattttcataaaatccccttcatatcgttattaagagaaatcgcaaactgccgagatcacaatgatgttaagttgcctctcatgaaattggtaaaacgcttggaaaaattatttggaacgtccgtttaagcatgttatgatggatgcttaaatttagtcaaaaaacagacagggacaagggactagctatctttgacagaatatagagttctcaattgttaaaagttaaatcgattttagatttgcacgcaccaacgatgttgtgaatgctggttacatccaacttgtaaatatgtagtgcaccaacttaaataaatttgaattggatttgacgaaggaagcaatcaaaaggcagaatatccaagaacgctagaaacatttatttctattgaactgccagatatgtcaataaaaaatgtatggcacgaaggatcaatgattgaatgaatcatacacttgttcataaaaagcaacatttctcgccagtatcgcatttaaaggaaactttgttcataaacaaataagaaaaagaaagaaaaaaaataaaaaataaaaatattatttgatattaggagaatgaaaaaaagtttaaagaattaacttatcgctgccaaatgtatctactgagtaccactccgatatacattcgaagctaaatactcccgtatacataaaccgctagatttttaaaaaaagtgaatctgagagaaatttgtgcctagttttattttaaataccttaatttctagttttctttgaacatcaggttctcgagttgcttgcacggtaacatcgatgatagatcagataatttgtagacgtaaatgttaaaaataaacaagaacaaaaaaaacttcatagtaataattagaaaagtatcaaaaaattaataagcatcctttacacgttttccttttatttactagcttatttatatttgtttatttgtttacacccggccgctgcagcacactccgttatcgttatctgtaaccaacgatattttcggacatcgttataatatactaagcctaatcatgtcttcatagacaccgatcgtttccgaggcaactcacaatggatgttttggcttagtttttttattacaaagccaatatttttattgcacaagcaaagctttgccgagttctaactgctccatttgttttcaacctcttcctctaccaaacagctacacaaacgactagaaaggagaaaacggctgtatcagagagtgttgtgacagtaatttacttttacatactcttgccgttcttggaaaccattcccgtgtttgcaatagagccttttttctttaacggtttgtataaagttcagcttttacgttgcattctctttttctttcttctcaacctccttcgttaatttcttttttattttttgttcctctttttggattttctcttatttctttttgtttgtttttccatcaaaaactctttttcttcatttattaacgttggtggattgtcgataagcttgcttgttgtaaagtagattagacccgacttcctccttttattcgatataaaatattttccaagtttcatttcattcttttctttaaaagggttggatatatacaggtggtattgttcttctagacttgtgtgtttcttggccttttttttttcatccgtataccctgttccgcttcatctttcctttaggcatctctttttgaggtagggattatcaaataagtaaacatttaaaacggaatctatatatttcctttttccttatttgctatttccttttttatcgggggattccccttttctagtgttacgctttcattaactggcactgttcataagtgatttattaatatccgtatctcatctcctccttctaacgttttgtcgatcctttcttttatcatttcgcttgcatttccccctttatttgctttctgctatctatcttctctttcttttttgtctcaatagcaggttttgattcctctttaacgctatccctgtgaataattgagaaagttaatagctgttgatttttccgtagtattgatcaaaaaatttccttcagatcattccgttttgcatattttcaaaaaacctttttttacgatctttccttttcctcgggttttttgtttatttttcttatattttaattacttaaacaccctatacgattctctcgtttacatcctcattttatttttttatctttttgccgtacgtacagctagtcacatttattgagtctttcttatgcatggtcttcaagggttatgttttagaagagctgttattgctttagcacttcttctttttcattccgtatttgctgctccatattccgaggatgaagagccttggaatttaaatcaaaacaaaaacgcttccagtgttttggagtattctggtgaatgggcagatcatgatttctttccaagccctgataactggcgaatgagttttattactgtaattttggatcgttggtatgatggtgatccatccaataatgatattgaaaaaactccatttgaatatgatatttcggaagtcagttttcgtaatggcggtgatatcgttgggctcgagttatcattggattatcttgaaggtttaggtacacaaggtatttatattgctggtactccatttgtcaatatgccctggggagctgatcaatattctcctttggattacactattcttgatcaccatttaggaactatcgatcaatggcgttcaactattactgcaatgcacgaaaggggcatgtatttggttgttgatttgacggttgccactcttggtgatttaatcggtatggttggccatcttaatgatacatctggtgttgattttaacttaaatgagtataatgccatgtggaaaacttctgaatatagatatgtggattttaacttcactaacgtttataatacttcatgtgaatacccaaggttttggggtgaagatggtggtcctgtttctattcaatttaaaggttgttatgtttcagactatgatcattacggtgatactgaagctttcggttcccatccggattggcagcgtcaattgtcaaaattcgcatccgtccaagatcgtcttcgtgattggaaacctgatgttgcagaaaaattaatgcatctttcttgtttggtgatttctatgcttgatgtcgatggattccgtattgataaggctacccagatgactgctgattttattgtggattggtcgatgtatgtgcgtgaatgcgcggcgaaatacaataagaagaactttttgatcgttggtgaagttactggctcatctagctatggttctatatactacaatcgtggccgtcaacctgatcagcggccccctaatgtaactgcagcttttaattatacatctgatgaatcgcagtactcattgagagattcagatcattatggatttgacggttcagctttccattactctatttatcgtgctctattacgttttctgggtatggactcaaagatggaaattgattttgatgtttcctcagtacttaccacagcttggaacggtattcaaattaacgaagatgctgtcaatataaacacaggaacagtagaacctctacatatgtatggcgttgctaatcacgatgtgttcagatggggagctattgaaaatggtactgctcgtttgatccttggtacaatgattacgtctttgctgtttccaggtattccgcttctgtattatggcgacgaacaaggtatgtatgtgttggataactctgcaaataattatctttacggacgtcaagccatgaactccgccagggcctggtatattcacggctgttacaatggttctgctacatcttatccaaccgtggatctgtcacctgcacaaagaggttgtcaggattcctggaattatctggatcactttgatattgcttctgctcatcgtaatgtttataggaacattcatagcatccgaagacattatcttagtttgagcgaaggatggcgatttgatcatatagccaattggacagatgatgtttattttcctgacagtcagccttatgcgtcccctatgggattgtatagtgttttgagaggccccatgaaagaaattcaggactttgattcaattacgaatgcctctaatgtctcgaaatccgaagtttgggttctttacgcgaatcgtaacgatactcatctttggtcctatgattgtaccgatgaggactcagcaattattgggccctggaagtccggtactactctaaggaacctcatttacccttatgacactattgagttagaagattcatggaatagtagctggggctgtattccgaatattgaactcgatccttacgctttcaagttatatgtccctgaagaggattttattgagaatgatcccattattactagtcttacacctgaacatgacgctagagttgttgcctcgggaaatgagattgatcttaccatcgaattttctaggtcgatggattgtgattcaattaaaaatgcattatctgttgtttcgtctacgcgtccaaaaaataccactgcagtaatcgatgttgactcgtcattttgtagaaactacagcgaggatgctagcacctcattacatggacagactgcaggtcggtttgcttggtatggtacactcacgaatattgatcctggtattcatcgaatttctctcaagtctgtccctacctctgatttctcgtctagaacattatcgactgataattttctaattagagttggtagcaccaacaaccccattgttcattacagtgccaattactcggatactttacttatcatgcaagatggagatctgtacatcaatcactctgccccgggtgccgtattgtttcgttacagtactgattttcaatcacattggagtgattgggaagagtataatggcggcttaactaaagttcaagcgagcaattggaccggcactcgaagacaaggatgggagggtcatcatattcatgtacagtattggagcgatttaggtggctctgcaaatcatatgcaacaaagtgattacggcttcaaatatcgccgatttcttccgcatatgttcctagagggtgactttaatgaatacggttacgattctggtgtagaaaatagatttttgcaaaaaagtgacttttattgggaagctggatttattagtgaaacgtatcctgctgctattcaacttaatgtgtggggaatgaatcccgacggaatccctgacaaaactcgcgtttatggaagtcaaggtaactctactgttttgagtagaagcgatccagcttctcttgttggaaacaatattacaatttaccatcctccccctcatggttatctaagttacaaaatcttattgcgagatgatgatatgatttacagacttgcaccctctggcgaatggggagtctcaattgcgatttatgtactttgtattgtaattcctccacttagcgcaatagttgtatcttgggcatttaaaaattcgttttacactgttaagtttaacaaacacggaaataatgaccttggaaagttttatcctttgaaatcattggtcccatttagaaaaaagaatgacttggatagtcccgccaaggtcactcctgtagtctcgggtgtatccgctaggaaaaagaaatgtgttttaattgctactctagaatatgatatcaccgattggaaaattcgcatcaaaattggtggacttggtgttatggctcagttaatggctcagcacttgaaacatgaggacctcgtatgggtagtaccctgtgttggtgatgttgtctatccggaagctgaagaagcatctcctattgaagttaagattattgatcagacctatacaattaatgtatatcatcattatttggataacatcaaatatgttttattagatgcccctgtttttcgaagacagaccagcaaagaaccatatccagctcgtatggacgatcttggatctgccatcttctattcggcatggaaccagtgcattgctgaggttattcgtcgaaatcctattgatatttaccacattaatgactaccatggcgcattggctccttgttaccttcttcccgacattatcccttgtgccttatcactccacaatgctgaatttcagggtctctggcccttacgtacgcctgaagagaaggaagaggtgtgtgctgtttacaatatatcacaacgtgtttgtacgaaatatgttcaattcggtaatgttttcaatctgttgcatgccgccgtgtcatatatccgtattcaccagaaggggttcggagcggtaggtgtttccaataagtatggtaagcgatcctgggctcgttatcctattttctggggtcttaagaaaattggcaagctaccaaatcctgatcccacggataccgacgagattgtagatgacaaggcagtggctattacagatattgatcctgatatggaaaagagcaaggttgaacacaagcgattagctcaagaatgggctggtttagaggtaaatgagaagtatgatcttttggtctttgtcggtcgttggtcttctcagaaaggtattgatttgattgctgatatagccccttcgttgcttgaatcatacaaggtacaacttatctgtgttggccctattatcgatctttacggtaagttcgctgctgagaaacttgatgttttacagaaaaagtatcctacacgtgttttctcccaacctaaattcactcaacttcctccctacatttttagcggcgctgactttgctttgattcctagtagagatgagccttttggtttagtcgctgttgaatttggacgtaagggagctttaggtatcggagccagagttggtggtttaggtcaaatgcctggttggtggtattctgtagaatcaagtgctactcctcatttgttaaaacaatttgaacaagcttgtcagcaagcgttatcatcttctcaacgtacccgtgctcgacttcgtgctcgttcagccaaacaacgctttcccgtttctcagtggaaggctaaactagaggcacttaccgatggatgtattaaatgtagccaaaagtatggaagaaattctcgctctcgttcttccttctactcattaatacatgaatcctttagccgttcttctgaagtcttgcctacaagcagtgatacaaacctagatgctaaaagagcagaagaagctgagatgattatgattgaaaccccacctactgctgaagctaatactggtgccaagctggatcgttcattatctcttggtagtcgacgtggacctggccatacaactgaagatgatgcaagtgatggattagatactattcaagaagaaagcatgaccgctggagattctacttctggtggttccgatatttcaagatatcgggctgagcgattgaatcccgattctcactctccatcagaatatagttttgattctggtgattatgaatttgatccccagcgttcttattattacgatgatttatttgatgatgacaccaccattcgtaatgcaccttctttccgacctcaaatgggaagttttgatgctgagcatgctgtgggcgctacttttagtcaggacgatctttcggaccctgctagatctgttgattctgattctgtttctccaccattacccccgtttgttgctggctcgaatccaaatgctcgcaataataacaacccttacttttacggtaacttgcatactgaatctagtcttagtcttgcctcagttatgtcaggaaaagaaaagcgtgacttttctttgacgagagttgaagagacttttactgatgaggacggtcaagcattaaggtcgttttctgagaagcttcaaaaactaaacgccaaaaattctaaggatgatttgtgtattgaacaatacttaatgaaatcagagcgatcatttttccatgaacgtcgtgcaattaagttaggtttacagaagccaaataaacttcacgtcaatgagctttcatctcactcaggcactgaagaatccgaatccttgagcaatggacaaacttcttatgatgatataatcgccatgactgacgagtccaactacactcagctaggagacgatgattttaaaacaattcatggtctcaaaaaatttatgcttttcaagatttacgactggccgatttattctattttccttgcacttggtcagattcttgccgcaactgcatatcaacttacattgtttaccggtactagcaatattcaaacgtacgagatctactctgtttgcgcgttctttatcggcgcttcatttgtatggtggtttatgtttgctcgtcttccttcttattacgttttgtcgatcccttggcttttttatgcggttgctttgtttttggtagggcttcctgcgtttgacacagtcgctcctggacgtgtatggattacgaacgttgccgcctggatatacgccattgcttcggctagcggatctatcttcttttctttgaattttggtgaagaaggtgctgtgcaaactcgtatatgggttttccgcgcatgcttagtccaaggagttcagcaagtatggtcagctgctttgtggtattggggtgcccatctcaataaaagattaactgctggtgaagctaatacttttaagatgtctcccgccattccttcaattacttggccactgagtgctgttagtatcttaatttttgcattattgtttaagggtctaccggaatattatcgacaattgtctggtagtataccagccttttataagtcacttttgcgaagaaaactggtggtttggttttgcatttccgtctttttgcaaaacttctggctatcatctcttaatgggcgctcctggtcttacttgtgggatattggaaatattcatcagtggcaaattttccttttaattgtagctttctatatcgtcctttgggccttactacttggagtcctggcttggatatctcgaactcactcctggattatctgcgtttttggtgtcggattgggtgctcctagatggttgcaacaattttgggctacttcaaatattggcttgtacctaccgtgggcaggttattccggtccttatcttggtcgtacactatggctatggttgggggtgttagatgctattcaaagtgttggaatcggtatgatattgctgcaaacattaactcgtcgtcacgtagcaagtacgcttatgactggacagatagttggtgccgttgctacaatgatcggacgtggtgcatcacccaaccgtgagggacctgctaatgtatttattgactttactaaatggaatcatggtgatggctcttcaatcttagcaagcgcacctttttggattaatattatttgtcaacttgctatttgcgtaggttatttggccttcttccgtcgtgaaaaccttagtcgtccttagttttctagtcttagtcttacaaagcgaaattttaattgaagttcacgaaatcggagcatgtacagttactgtgatgttttaaacaaaatatcctccaagctcggtcttgttgagcatcaggtcttttaaatgaatacttcaagttatgtttcattatattctatatccaccttatttaacttcctcatatccttgttactattcttatctagtttccgttggcatttggctttgctgacgagaatgtgttatatctaagctttatttaagggaatatcacttggtcatacataaattgcattataaatttcaattagcatagtatctacattttatgataagtgttacatgtttccattaaaacaaaattaaatctatccgccctttgtatgcttaccgatttctttcatacaattagattttttgtaatactagtatattagaggagctagttttcattgctgtctgtggatgatccctcaacatatacggctttatatacctcttatagaatacgaatgacaaatagaatatttcagtttatcatgtaacaatgctattaaaaacataagttgccgttatttaaaagagcatggcgagacaagatagtaccaccaccgatttactttcaccaactattgtaaactaagaagtcaaattttggtggaatacaattagcaaatgtcacgggaaatggatctattgtttaagaacgaaatgactatttcgcatcagaaaatagtaatgatgctattcataaaaccgtatgcagatgtgaatataaaaaagtagtctatggctgttaaattcttaagatgcgaaaggtaataattcttttctaattactcattcctctctaatgtatacaccaacaacaacaaaagaattgttttatagctgtagacaatgcgacgaacaatttgttaaatatggaaaaccaggacagcttcatcagaaattaggttaaagatctgtaaaaagcttatttatgcttattgcaccaaaaaatatataaatgaaaacataaacagcggctgttaaaagcctattaattaaataccaagtttcaaatgaagacacattgctcagctatcttcgtcttctctataattatagatgtgcttttcgcgatgcccagacctcgcaacatttccaaaatttttagggtttgtccttccaggaaaatcttcagtgcttttaaatatactagattctccaatcttctttcgtttgccaacgcgtccagtttttacacctcgagcagcaaactgtttccaagaattttgtgatgcttcaagtgctgctttaggttttagttgtttttgctgcttttgggagtatgaaacactaggaacaggtggagggttagagggaggaatgggagagatctttggtagggttgaaacatgctgagcgacattttggatcggagatacgttagccgttacagccgccgaactcttcatatctggagaagaggcacgagacgcataattggaaggacttgtagacatagatgctacagatattgcttttgtaggctctctaacaggtgtactacgtatagtggtagattttttgagaatttctttatttccttctatttcctgacgtttttcctcaggcatggccttaatatgtttgagggaaacagtttcaatgtcaggatagtcaagaaattgtactgtgtactttttgtttgcaccgaagcctgaaacagcagtaatacgtgaaggataaaataaataatctcctgaaacccatcgggccattactaaatttccaggcgtaaagtcgatatgtactggctttgaagtattgaaacctgcaacaccattttgggaattttgaaacgtatttttatcattttctacactttcttgtagtaagttttcagtaaggctaattaattcctttaaatcattttccagtaactgtaattcctcgttttggggagtcttctgaagagaaatttgaacgagagcaagctggctcttgtattcctctaattccttctccatacgattacttttatagatttaatagatttttttttcaaacagtaaaaatttccaagtgtaatggctttatcgccaaaaccggttgtaagtgtagataatatgtgaagcaggcgctcagtgaagtgcctgaaaattaagctcagctattacactagggtgaagaaaacaatattggagtgagattaaatttatactaaaagcactaattctttaactcaatatactaagacattattgataatagttaaaacaaagaagaatatttgatatttctatattcagtataatcaagacgtaaaagaaagtattctatcaaaaatttcatgctctcgaaaactatggatgggtaaaaagaactggataatcaagtattttcgaggttcgtttatggcgtgcatgatatcgattaaaggcattgaacgtttaatgccgcataatggaggataaattattaatccagaagacaatatgtttccgaactccaagcattccttctttatatgaatttattattttctaggtcagctagaagcaatggcattaggaggtactataatttaacgatttcactcgtatatctttaaaattttggagtaaatgaaattcttacaaaacagttttactaggaccataagatcgatccataaagaccttcgagacttcccaggcaagccaatcgctggtagtcgttggcaataatcccattctttgcagcttatagactccaatccccataagcaataattggaataaaatataagcacccatagcgggccaaagggttcctgggtgggtgcctttaaatggggtgaaggcagatcctgtagatgttattgctttcagtggatttacaagcaacataagagtcgtcataatactgaaaatttgtagtgaattaccagacatgtatgctaaaatagcgttcataggaatttgtttaaggggggaatatgcaagctcccatgctttctttagtaagagatccttttgtaattcttcctctcgtttagcaaatatggaagttgaggaagctgaatttcctgaatgaatgtttttggaaaccaacgacttctgttgaaatcctcgaggcgtagggaacttgtcagaattgtcaacgatctttttgggcttctttgctaacgctggtttgaccaaatcgatccaatctgtttcttcgttaatgtgcatcttgaaagggaaaaaagagaaatttaaagttgcgactaaatttttggactcgtaaaccaaggaataaatttagtcaatgaatgaaaagcctgattgcagctaacctacagtcaaaaagtattggtagcacctcaattatgtttctaaaatacgaagaccagccttatttgatgtttctgaaacaagatatttcaccagaagtcaatctcagtttttcgttatttgatgtaagttgggtggtagaacaatcttttcaagcaaattaataactttggttgaagttaaaaattttctggtctaaataatttgagaacacgcctcaaaatataatatttcaaaataaacaatatagtggaggtggcagatgctaaggaacgaaactggtggtaatagtgaaaagcccatcagctaatgaatcccaaaaatacaagcgcaaacaatggcaaaaagaaagccatcctgttataaaagttcaagattaacttgcttttgtgctttctttggttttctactgtctcatggcccggatatgaatatgtacaacgcttaaacatctaatgttaatgatttcttgttaattatcaaacccaacgatcattattgattacagctggaattagttttggtttcttttatggatataggatcttgatcttgaaaaagttctgactctttatcttacaatggtaataccatgctcaatgattgatatttttacactgagatgttttcaaatattcaatggataaagaacatatcgttttgtaactttttaagcataatctcgttagccaagctattacataaacaaagatcggatacagtatgaaagtactcatggtgtaaatatttaggaagacgtgttttggagggcactctttgtgagaatttttttcttattctagaatatgagttttaacatattgccgcaagcccaaaattgagttgtacgactcaatatactctgcctaaaaagtaagtgcattttcgaagcataaagaaaaaaaatgaacattactggaaatttattttgaaataatcgctttttaatcgtgtaatgtattgttattgattaccttaccgatactgataatgcttgcttttctcctgtttcgagtttccgttcaaaagacttcttgtttatgatatatgactgcgcataagaagtgataattgtccttgtatattaatattgcctgaaataacttgtaagaccgagcgtctaatttttaaaaatatataatatcaagaggaaaaacttgccgttctgctatgatagagcaaagtcgaaaacaacgtgaaccttcaacgaaattctttacaatttataaaccatttcaagtcctccattctttaaaacggaatgattctccttgcactcgaatctcacataaatatattcaacgaaatataaaagacactttgtttattttcaaatagcttgtttgctagaattgctgctacgactaattcaaaggcagcctttggaaattgaacaacattaaatacgactctagtttccattgtttcattactgctcttttataccgttcacagttttctaagacccctcaaataaaagcaattcgcgcttttgtaactaacttcattctggcctaattcatacgaaacactaatgaatgggataaggaccgttgggcagttttctgagtaaagtaataataacagtatcctgttgcatttgatcaaattataaaatgatctaaaaaactcaagcacccatgatatgaaccgtaaaaaacctttcctttttcagagacctgggtacagaaacttgatcacggtttattatagataagggccactgtaaaaacataattcaaaaaaatataaatcaatgttatctaaaaaagcagagaaataagaaatttcactaatcaacagtaaacgtgtgggaaaggttgaatgttgtaagactagcgtcacatccctccaaattataaatcagaacaaaatttatactgacgctcacgaaatacaaattactgaagattcataaacagacgatattttccttgatttttgtttcaagttggttttccccattttgaaactatttggtataccaattgcaccagaactgaaagtatagtagacatttacttttcgtgagaattagagaatttcttaaaattatttttcttctcgatttgactgtcatttcacaatgcctattgtgaacggttttaaagtaggacctattggcttaggccttatgggtttaacttggagacccaagcaaactcccattaaacaagcctttgagttaatgaattacgccttgtcccaaggttcgaactattggaatgctggagaattctatggcatcaatcctcctactgccaatttagatttgttggctgattattttgaaaagtatccaaaaaatgccgataaagtatttttatcagttaagggaggaacagattttaaaacactcgctccccatggagatcctgaatcagtgactaagagtgtaaaaaatgcacttactcgtttacgtggaaagaaaaagctagatctcttccaatgtgcccgagttgatcacaaagttccaattgaaactaccatgaaagcattgaaggcttttgtagactcaggagaaatttcatgtgtcggtcttagcgaggcttctgctgaaagcatcaaacgcgcccttgccatcgtgcctattgcggcagtcgaaaccgaatactctctattctcacgagatatcgagaaaaatggcattctcgatacttgtacacagctctctatcccaataatcgcttacgcgcctttctgtcatggacttttaactgggcgtgtcaagactgctgaagatcttaaagactttatcaaagcatttcccttcttacggaatatggacaagtttaatccaaaagtttttgaaaaaaatatcccgtttcttaaagcagtcgagcaattggctcaaaagtttggtatgagtatgcctgaattcgctcttaacttcattattgcaaacggaaaaggcatgatcattcctattcctggatctacaactgttcaacgagctgagagcaatcttagtgcactcaagaaatctttgagttcagaacaacttgaagaggctaaaaaagttttggataaacatcaaatctttggacttcgttacaacaaacaacttgaatccaccctttccatctgagcatgattttagcaacttcaccgatttgagttttttatttaatatttgcatttaaccttaactcctctctagatttagatgtatacatgctgtgtcatcctatcggcatcaatacaataaaatatttctttaaaaactaagactgtagtctttgagtttattcacacctttatatattattctctattgtcagtgatttatcttacactgtgtaaaaaatagaaagtaaggtagtgtaaggaacaagaaaactttcaataagctttgggtataattgaataatcagaaacttcctttacacagaataatcatgactttggtgacacaattttttagaatgtcaactgctctgcataaagtaatttaggaacgaaattgtagccttgatataaattcaaccctaaagtattatgatggtctacggttatttcggtctagtcgacgatgcacaaaatgagatgtcaataagcgcgatgcttcaatcattttcttgaaacttattttaatcaataggaattatctacagataggttacgctcgattattaattgcgataagaatttacattgaattggttgccaaggctggagattcatttttgaattcaatacaacaatgaaaacccaacgtattatggtgcttcaaaaagcggtgtagtagaaagtattttatttaactgctagtatcttctacgactgacaatcgttactcatttcttaggtgttttcaatcctgcatctaggaagacgatcatcattcttactcttattgtttccgccaatatgcttttgatatttagttatctaaatagtaggctgcttgtatcagtataacatgtagcaccaaggtatgcgttactaacagtaggatgggtttagtggtagttgtgctaactataaccaaactcaccaccaaaaaaagcaatttttaacacagtgctattcagtacgataagattgaactgtttatggaataaacaccttgcaattaaagtatggattctacggctggctccgatgcttccactcctacaaatcacacggtaagctcgaagaagcgaagaggacgccctcctaagggtagttacgccgcatatggaagtagtgatgatgatgatgaagaatactctgggcgtacgcgtcgtagaaatcgtaatactcgccctagagtttcagcgccgtcttctagctcaacagtagtaccgaaggatttgtactcacatcgggctactttggaagatgatgagctaaactttggtgtagtagatccagaaggagagaaaaaagtgaatgaattggggtatttgaatggcggtcgagagtatagatgtcgaacgttcacgtgcttaggtcgtggtaatcgattgtatatgctttccaccgaaccagcgagagcaatgggctatagagattcgtatttattatttttgaagcatcgttcactgcataaaattattgttgatgattctgagaaatgggaccttattgaacgaaatattattcctcattcttacaaaggccgtgcggtaggtattgttgctgctcgttctatctttcgtgaatttggtgctagaatcatcgttggtggtcgacgaattgtagacgattactgggaaggagaattccgcgctcgtggtttcgtcgaaggagaattagctgatccagacgataaattgcctcctcccggtatgccatacaatcgaaatcaatacgtcgcttggcatggagctagtgcagtatatcacccgcagccttcactagaagctcagctgcctgcagctgctcgaaaaagaaaaaaggaacctccaaaagatgccacatggctttttcaacatgctaaagcaactgcagcttacaataatgatattacaaaataccttgttcaaaaacaggatatcggttattttgaaccacatactaacttgttgcatgttccccttaatacccaacctacaaaaacccattggattcaggcaaagactggtacggaatgtcctgcacctaaattggatattctcgttgctcttaactcggatgtggctccacaggtgtctattgcaaatatccctccctccgtttatgcgagttgtccactccacgttcaagaggctattcgcaaacgtcaagaacaagagattcgtagtattcgtttgaatagcatgtactagagtgctcgttttcttttaatcctattttgttttggatgttttataatattaattttcagattgtatacagtcatttatcacacgtacgacgtaagcccgaattatcttcttactcgagttatttacggagaaaacatgcgttaacgaaatccaaaacttgttaatcaattactttagtactttgtttttgcttagtaaagcggaaaaaaagatattgtctacaaaaatcagatgtacattcaacaaaactattaaagaaatgatggcgcgacgtttccattgaatgaaacgtttaccaaccgaaaccaatcgattagcttgtatcctctcacttgtcctaatcggtccagccgagggcgaagaatattatggaggattgtttgatgaattattgggcatggtcaggtcgtaggttaaaaactttaggtaagtcaaaacgtggctttggcgaaggagtatttgtgagaagaacgattgctgttataatgaatattaaataagcaaaaccgatcaccatccacattataaagaaaaaaccattgaatcccttcaaataatacaccaggtcgacaatataagcaaccaagtggaggacaaggaaaacatacccgaattgtcgaagaatgataaacttcttcatcgtcgcctgggtgtacattttatatgtgagctcacctcttactgctatcctgtcgtaccctgccatgatgatgaaaccgagagaagtagatattcgtgtaacgtgcttcaaaaaaaaagagcgttttaagcagacgagaacggtaaataaaaaaatggctcttcacgacaaataaaaaaaaaagaatggactaattttcaagtccaaggtgtgtcgcaaaatgtatctcatcaatattaaatagtgagatcattcgacgtaataaatcttctatggactgaaagctatgatttttttggcattttacattcatccatttccttgtgtcctaagattttttgtttacttagtctgttttgattacgaagcaatgagtgcaagaggatccatttaactgcaagaatttcgatcacaacttccaaacgtcgagtgcagagaatggattgacaaacaaagttattattctataaaagaccaaactgataattttactgtttttatctcttttcattgcggatacaatgtgctttaccgctttatcatttttatagtaactattgaatcatcgaatctggaaaatggtacagatttatcactcgttgctgttgccgatttcatctttaacactatcaatattgtatctattattgccatgattttttatactcttaaaaagttcgatattgaaatcactagagaagtaatggattattttacaagatattttgacggacagaaattgaagaaaaataacgtataaattcaatcatttagtcaccttattcaatgtttttctaagaaacaacgcttcagcatactagctttaatggaaaaattaacgaaattcaagtttccatagaatgggtggtgaagtatgagaacacataagctgttaaacttacaaaattagcttttaggaaattaccaaagaaaaaaaatctcagaaggaagaagctcaatgtgaattgctaatcaccgcaataaaacttatttggcattcattccgtgacgttgatcaggttcagtcataaagactggagtgtatttatagaggatcattagatatattttcatcatcggtctgactctttggctcaaggcattgcttatgaggaatttggttgactagaaaacctaaggagctgccaataattgatttgaggattatgttattaattttacatttttgggaccttcaaatttttaaagtgcattcatcttgctcatattttgtataaagttaacagtggaccaaggttggagcacgccgtctgccggaactgacataatactgaacagcataaacttcatagttgtttgtgtcgtgtttatttttggtacttataaactcaatattctttgcaaaaaacatgagctagatgaatattgagagatttctgaaaaagccgtagtatgaagaatgaatttttatatacaattttgagtctacaaataaaatgtacacgtatcccgcctaataccatttttgtaaagtgacttgtatagtattgttgagaacaacaaaaatggaaatgcccgctcaatttcttttaactttgtgcaaaagaataaatagtgtccagtagcttacaattgcaataaagaagaatttaacttttataacttgagatgaaacaaaaatagataattaaataagcaataataataaaaaagaaacgagaatctcgaattttcaaagttttaactaccatactcatttcgtctcgacaagctgttttgtgttgataatttaaattgtttaattatgagaaattaaaagtctaagcactgtaagttgactgaagtaaaaagagttactttcgaaaacgactctattcaaaatccctacatcgtattcattcaataacgactaccgctgtaaaacccaaataatcattcattactttaattaacaatcatcatacaaaacagattttttataaagaattttaaaaggattaaaaatgcattatattattgctagttgttaaaagaattaaacagaaaaacttaaacatcccgaggaataattagagaaacaagagaatagagaacatgaaagaaaaatacagacctcatttagttagcggcagcagcctcgatgggaggctgaatacgagtaatttgctcaccaacgcgaacaatcttttgtccttgggtatccttcatagggagttgggcaccggcaccagacttccacacctcaacctccataccaccgcgaacaacggcgacacgataagtggaaagcaagttgtgggcaccattagtgtggtcataaacaccaccgttgaaagcagcagtggcatccttaccgaaagcagaacgcaaaaggccttgaccacctgggtgctcgaaaccggtcatgtcgtgaacaacaccattgatgagaaccaagggacgagtcttgctttgctccaaaaagtcttcgaattccatgacgggaagttgttcaagaggaataccccagttaagcttggcacgccagcggtccaaaaccttttgcttttgttgaacaatacccttttggatttcgttgtcagggaaagtgttgaggttgtaggcaagaccaaagagactggcaatgtagatgaagatcttggtgggatcatattcgtaccatctaagaccgttacggtaatcgttggggaaagcatggtggtagttgtggttgccctcaccaagagtgaccaaggcggtgatgaagtggttacgggcactgttggtgtcgtcaaagggttggctaccgatcaagtgagcaagagagttaacacagaaggtagcgtggtgaacaaagaccaaacggcagacaccggcatagaaataaccaccacggtaatcaccccacaacaaaccgcagaagagagaagggaagatgaaggccatgaagctagcaatgggcaagaagtgacggtggttgaacatgacaaagggatccgagttcaaatcggagacatcggagcgaccaatacgacgggggttttgcaagatgatcatccaaccgacatgagcataccagaaacccttcttgacgttgtagggatccttgtcggtatcggtgtaacggtggtgagcacgatggtcacgagaccaccaacgaatggagccctcaaaggcagcagcaccaccggcagccaaaaagtattccaaaggcttcttagccttgtaagcacgatgagaccagagacgatggtaaccggcagtgatacccaaaccagagtaggcgtagtatataatggcgaaaatcaaagtcttggtttgtaagggagtggtaaagacaccatagatggcgatcatgggaagaccaaagataagcatacaatgaagccaattcaaatgtctccaccagttttgcatggtccaaggttgttcttggatatgcttgggggccttgggatcccatttgcgttcgggaacgctggggacgacaggaatagtacgcttgcgcatagaagcgttaccctcagtggtgggctgagtggtagcggaggagaaagcagttgcagaaggagcagtcatattgtgaagaaaaaataataataaaaaaaaaggaaagtgagaagaaatatagaaaaaaaaactagttccaaacttggttctttataaacaaagacttggaaaaaggtctacaggcaccacaaaacaaaaaaagaagaattctagaaaaaggaagaattcaagaagttaagcgatgtttccagacgtacaagtagtataagggttttttacgtattctcgcaaaaaaacctaaaactgaatgtagaagggaaaaaatgaagaggcagtaaagaaaaaaaaaactttttcgatactagcacacgacaaaaggctagagaggcacaaaaaaaataaaataaacaaagttgtataatcaaagatacaacgagattctaatttataggtagagaaaaaaaacaagcaccaatcaaaagagaatcaaaggagctgtaagaatttcgataaaaaggttcgaatcaatcaaaaatcaaaaaaaaaaaaaggaaaaaatcaaagaattaaatgtaatgtaatttaattgtttgatttgattttattttgtttgatttcaatttgatataattttctcgttccgatttcctaatctattccacgtaaatgggaggatatgtgggtggaggtaaaaaaaaatggaataccagggttaaacaagcaggcaaaataaacgtgctctgtacaaacaaccagactgatcctcgatacagttgggaatcgtctttggctgatatggagaagagctaagatgacggacaagcaagtatgggggatgcccatccttatatagcgaagcgtgagacgaaatgacgttgagtcaacttaggttagggtttacgtgaggaggagtctatggcgaaaaaggacggcaagttgggaagcaaaaccagggtaacgtagcggtgctaatcagcgcgccgataatagaaagagaggataaaatgcaagtttaccctagggggaaaggcgtccgaaggctcagggggggaagggtttggaggaaaatgcgaagcggcaatgaatttggacggattggtttgatggggatgggcgaaagaacggcggaaatcgatgggagatatgtggaggaagggaagaagagtaggcaaaaaagaaagcgagtaggcagaaaaaatggatgaaaagagagagaagcaagaaggttttatgattataaatgtaaaattatatttgaaaatgttttaaaatgtaaaaaaggaattgaaaatttggggaaacattgaagttttgtgggtttttcgatttttttgttttttttttttttttttttttttcgtttttgaaaatttggatggtttttgttttttttggaggttttttttttgggacactgttttatctaaacaaaggatgagtttgggtagcgaatttgggcatttgtgcttcgtttcgtttcgctgtttgtagaaaagattgcggttttgacttgatgtttatctttgggttttttgccaacgctcaaatcgtcaagggaagaaggatctgataagcgggagtggaggagtagagaaagcaatgaaaataaccaaaaaaaaaaaaaaagaaaaaaaaaagtgaaatgtaatgtaatgtaatgtaatgtaatgtaatgtaatacaaatgacaaggaattagagttagaattagaattagaatagaataaaataaaattagaataacaaaaaatgaaattagaataacaaaaaatgaaatagaaatggaaattgaaatgatcaacatgaatactatgaaacaaacctttgctaatagtatagaaattccaacattatggattgcacacatattggcaatgaagtagcgcaccgcaccgcaccgcgctgtctagcccagtgaaaccgagaggaaagaaggaaagaaaataaaagaaaaagaagaaaataaaaagaaaaaaacgaaaaaaataaaaataaaatggcaaaaagcaaaaagcaaaattagttgaatggaaatcgcaaaatcgccacgaaattcaaactaccacgaaatctaaaagtctactacgtaaacgactaggacaagtgagaaagaggcaagtgtcagtaaaaaagcaagcatagatgagccagggtgagcatttgtagagagagttaaaaatggattttcaatattgattacattacaacaatcaatcgatcatatcaacaatatcgacaacacaatttaaagccaagccagtaaatactcgacaatcaagcatactaaaattaacattattaaaaatcaacattactaaaattaacaacaatccattccaaacaatcaacgatatttccatattcatttctttttcttttctttcattccatttctttttcattttcttttcacttggtttcttcaaaatcctcttttcgtttgtttctctctcctcttcccctgtccacctgactttgactctcgcctcgctttccttaacgcttcattggacctcctccttatcttaacgagcttttgtgtactttggtggagttttaagattctgcactaaagtagccctccaccaatccccgtccacacagatcccaaacgaggggaacaattgccacaccccttcggtggttgggaggcttgccgtgggaacctgacaggacaagttcttgtagccaatcacagactcattgataacggcggggcattttgtggacaaaagcacgatcagcggatggacgagaacttcaggcttaaggagacgtaaggaagcggtcaaaaggtgtactatttatagaatttcccactttttttttcttttacgcggaaaatcttttttaggtggaaattgcaactcgttaaaacggggtagagattggattggattggattgggatagggattggattttggtttcggtttcggtttcggtttggggttcggtttggggttcggttggttttcggtttccatttcggtttcgttaagggatatgtcaaatccaacttgaacttgttttgaaaacaactctcttttactgtttctttacaattcctttctcaatacaaatccaatacgatactgtcttgcactgtttggaatagcattagcattagctttattttacctattttatttacttttcatttcctttgtaattgctgtgtgtttactttttacgttcttttctatgtcgcatctgcatttgcatttgcattcgctttcgcactcacactcgcactcgcaccacactcgcattttacattcttctcgtcaacctcccattgtacttgtttagcggaaatatcactcggtactttttaagcatcttcttctctcttttcaaacaattcggtcggttgaagcttaactagtttaacgtttcgtaaacgaaaaacccgcagagacattggtattgcacacaaaaagcacgcatccaaacaaaacaaaacaaaaattccaatccaactcgttgaattggaattttcaaccccataaccaatcgttcaacccaaattccaacttgttggaatttcttcaaaaaaaataaactcaaaaatattcgacattgggaatgggtccaagaggagtaatgcctaatggattgatttgggtgtgactttgggtgtaatgacatttgatgtgtttaaaatctgtagtttcatgaaacgccggatgcttccagtatagtcttttcaaccattgattgatatgaggatagttgtgacgaatggtaccaatgttgcatttaaagtgttgtacatataccgggtcaaagcgtacaatcgtcgtatacaatcgcacatccgtctctgtcaaatgatctccaagaagaaacggtcctttgctttccttcaaaacctgctccagtcgatcgagcccttgaaacacaacgcgcacgttcttctcgtacgcctctgccgtcgtggcaaaccccgtcttgtagacgccgttattgacggtatcgtagaaatagtcgttcaactcgtcaatcttcgtcctcagcgacgatggatacaaatcgaccacccgcttctcctcatcctcaattacctcgttaaaggcatcattaaacatacggatgatttctgcactctcgttgttcactatcgtgttgtacttggaatcccacagcaccggcactgtaaaccgcatattgtaattgggatcggcgcgaaagtatagattgcgaaggtacggactgttgtacaagggatcccctgtactatcgttctccttatcaaagttccacccgttcggtcccataagccagcctaccacatgcacagggatcacattttctagacccttgagttttcgtacaatcagtgttcgatgagcccaaggacatgcataactcacgtaaagatgataacggtccttttctggctggaaatacttgtgctcaggtgagattctctctcgaaaggaagatacttgtcttcgaaattcgccatcctttgagctccaatcggtaatatgagtgttggacatggttctgatgaaaaaacgttgctgtaccactcgattcgtcaaacgtgaaaattttctgcaaagcaaatccatgccgaatttatacagaggcaaatggcaagtacatgagtaagcatggtgtcatggggtccatggttgggattgtatcgttccccatccacatggccattcatccattcattattagtaagactgatttcattgtggaagataaattagaagaaagagtggaagtttaacgaagtaaaaggtgctgggatgttgaagaattgcgatgcataccgtgtacgttgttaaatgaaaatggcaaagtactttaagaaatacgttgcaagattttagaatggtaatgcctcgcatcgctttagctcgttacttgcattcacactcgccctctatgttggacgttcagttgccttacaaccttacagcaacacaaattactttacgtagcgagcagtttacggattgctttagttagcagtaaaccccgatatagcgtttggatgatcgaccatcgatcgttacacacagcgaaataaacaaaaaaatcattgtgacaaaatgatggtgtcagtaaagaaatgcaatgcctcattgagtgttgttcctttttcctttttcatgaatgccgttatttgaaaaaacttatttgaccgacttgcttggtttgttaaaagtcgttgaaaactagtggaattcagttacaggttgatttttagatttctctattttgttttgtcttgatctagcaattaaagtatatttgtgcataaatctaattgaacttacaagttatcctttccttgaaaatgaacagcaattacgttcccttgacaagttcggtagatgtggaagagaaaatggaatcggaaaatggagttgatttaggaaatgatattgacttggaaaaaggtttacctctaaaatacaattcggagaatgagagcggtttgccttcaaattcaggtacggtttattgtttatcataaaaaaatgcaatagtaaagaaagttttacttcttgtctaactgttagtgaacgttatgtgcaatcaactctagaatagcacgcacgttcgtcttcctttcccaatgaactaattttttcatttgtattaactattcgtagcttcttcatatttaatcaatcctgatcctacgatggaccttgaagcgcaaacgttcaatcacaatgaatccacgacctctgtaggccatgacaatagcaactctcctcctaaatgtcggaaaacttgttcatctaataaggtgtatagtaatgaggtgcctctgttatttgtttttgtgatatctatttccatagtctgtatatttgatcttgttatctttggttgtctacagtataacatggtttctatggacgatttacacgtaatgcaacgtttatcgtggttctgtgctagccttgctcttttgtttattttaatgcgtaagtgagacatggaattgtactatactcaataactaattcattaggctactatgatttttggaccaaggcatgcaaagatggaatcaagcacatttttaagaagtggaaaaacacgcctcttgctttccttcaagtgcttatattcaacatcattggctttttcgtgcgaaaaggtctaaaagacagttttggcgagcaatgggggttgaaaacatctctctttgcccatgtttcctttgctactatgagcatctttatcttcatttttgaaacatgttcgttatatacctgttattatattctaaccatgtagtaaaaccaggatcatgcagtgtcgattggatcgcaaggatattgaaagcggtggtatgttgcatgggagacattttatgatgagttgttttactaacaaaactttataggtgtattttcttgaagattcagatgaattgtagcattctcgttatgaataagatcactaaacaagttgcgacctttgattttattgcatactttgtctgtcatacgaatggcattgactagcaaattgcttgaaagtattaacgattagtttaaactactcattatatttttgcatacgagagctttatgatgatcaccacgtagaataaccgttttcagaaacagttagctcaacttatgaaattataagattcattacttcacaacctcgatcaaaagttgtttcattaatacttttgctatgtacggttttccctccattttggtttttctgatgaaccaaacatgtcgcttattgtatatgctttaattcaaacaaatttaatgtttacaaaataatgaatagcataataaaacattgtgactgtcagcaatactacactacgctataatacactacgttgcgtatcactatatgtcacatgttctaattatatatagtaccatgcatgatacgatattgagattgatcttaatgataatctattaagatctatattatctgaatactataaatagagctactgctgaacctcgttcctcagttcagttatgagctatattagtgataggtaacattataacctaattaatacaatacctatactcagttgctactcatataacctgtgtaatgtaatatgatagatcacaaggaaaactcaccgcagtactacgtatccttaaatcagataccaaattgcgtagctgacattatattatactacaacgttttgcttctcaaaaacgtttaaggaaagctaagttggggtgaataaaaagggcagtgacaaaataaatgtgtcagaagtaattcactgcctcgttcttctttttttatgccattgtttgaaggaattagttggaaatttgtttgaacgattttattattttgttaaaaagtctttaaagcgattggaattggactacagagcgaatattcttgaattcgctgtttcgtttgtcgcaattatagcaattaattcgcgcatgtattttattaaataaagaatgatcttattattatgaagaataattacacttccttgaaaagttctgtagatgaagaagatgaattgaagacaggacatgaaattgatttggaaaaaggaccactcccagaacataattcggagggtgagagtacactacctccatattcaggtaagcgttgcaaacaataaaaaagaaaaatcaattaaacttacatcttgctgttgctttaaaataacatggttgtggtcattgtttacagttggcatccccaacactagatcatcaaacatgcgcacattgtatttactcatgttatgaactcacgttaagttatcaaaattggaatatatatttcactcattctttaaatattacacgccaggctaactataaatgcagacatttcgaaacttgctaatcttgtacctgaggattcaagtacaggacctacagaaactgcaaatcccaatgtcgaaagaagacaagaattcaaagatttgcatccaaatatatattcccttctgagactactaatagcagttctagcagttagtgttgtcttttttactgcatggggttgtgtaaacccgttggagaagtcgacgtttggcaaaatagcattctttgttttaattggcttaacatgtttaatcctattgattactatgatttgtaagctacgaatgaaggtgttattacgctctttcactaactcatcagtcttctagaaaatctgaaccaaggcatgtggaaagcagtaagcaatttcttgaaaagtgggaaaccatgcgtctggttttcgcagaagtctttttatttaacatacttgctggatcaccacgattgaatttaagatacatttctggcgagagatgaggattcaaatgctctttggctaataacgttatctttgctgtaatgagcgtccccgttttattgctgaaacaggttcgatattgactaaacattaatttatattaacaatatagtggaacctggattaatcggaataagcattatgaaaagattaataggagataatggtaatgatggaaagagactattttgtggaaaatcgtttgctatcatctccagattgtgatgccagacagcacgcgaacagcgacaccgctattccattgcgtgaaatgaatcctgaaagtgaagcctaattatattgctagctttactattgaattacaaaggcgttttctcatgagacttctctacaaggatttgcaatgggaagaagcatctttgtaattgtgatttacccaaacaaatcatgatgtgtttagggtatatcaaatgtatttttaatgcatgatttcatttcctgacgaattggatcagcaagtgctttgcttaaaaaattctgcgatgttggataacatgtactgggcatcgaatttttaatttgttatggacgcgatttatgaagattaaaagtatgattttatttattcggaaaacagtagttcactaattaactgtcataattaactaatgaaattgggaaactctctagtcgtcctagcatactcattatatattcaatcattgtttcattcaaatctttgtctaactcgtttttctcattttcttaattttttaatgatattcgagtttaatttttttattctctttactttgttatttaaaaaaaactttaataaatggtgggaagcattgtgataaaaatcgatgcatcagttatcttaataaagttgacggcaattcctttatccaagcaaattcttgcatctggctgagtgtaagaattcgtagcaaatgctattacttttgctcggtataaaacccttttattacattattattttttttttggtattccaatattttttttgcaatacaattgaatccacatttctcaatttacttgtaacctatttgagagtaatgataatgttaagcaacacaatattgtttattaaaattaatattatagtaattcattaccttagtaatggaattacagagaccattgcacttttgcgcatcattaaaaaaatttataaagggacgcatggataactatgggttttgcaccccgtttcgctaaggcaactcttaatatagccgttatctcagtattagagcgctcggtataaggtgagtaaataaataaaggaagtgaaatgcaatgtttgcgaggtggaaaaactgagctattatggaattcctatctttgcttagttttatattagtcggaaacaatggtaaagctctgcaatcgatttatgcaagcatggtgaatgggccttatgcatgtgtgcgatcaattttatcaacgctaaacaagcagtagatgtagcctcaatactatatataacccgtacttgtctaaggatatggataattgtatgcaaatatacatgcaaacacgcatcatcaaggattgaagaggccagctatgtttgaaagatcatgattcattgagttggaagtaaacgacaaataaaaaatcgaaaaaaagtataattgcaagtacaaagacaatttaatataataaaaccaaatctccttgattaaaaaaaagtgttttggaagttaaagggaacgccaatgtaagtaaataaatatcgcgggtaatttcctctttgttcttcgagacacaataaattaaatgaaaatacgagaatcaaacacagtaagacatatcgttggctaatcacattcccaatgctttcttattgcactgcatttacggaattctcatttgaatggattgagtcggattgaaaatcagcgccaccgtcacaccattcatatgaaccactttttttattttgataaaagggtgttcatttcttcactttcttctatttcttcgtttccttcgttctcctcttcgagcgatggataactgggaggaggtacctcttcggcataaggataataaccaccggcattgagcgccatttcatcttctcccggttcctcaatttgtctttcatctacaagttgaaaacacggccacacaaggaacaggaacatcacaaggaatccagccgccaacacagtattcattcccaacacccatcccggcacaccaaaactataaacgatggagccaaccgcaaactccatgaagcatgggattagcatgtaaagagctcgttttgaaagaattccttgtatatgacaattcttttcaaatgcttcgaagtaagagtaacgtcgtcgaatttgctcgcgagggacggcatggatgaatacattatccacagtcatcgtaggaaaagtgaatttacaggaaggaattaggaataagtacgtttcaaaaagtcaaagtaaagttttcaggtattttttattacaacaacgtcattccgatgtggttttcactatacccgctgctacactgagtaaagagggaggatactgcggttagcccaaatgtggaaaatgtccttgaaccctacctacccgaagcaagaaatccggtgttggaaagcgctgaaggagcgacattcacagtttgattttcttttctttttttctattcttggacatctgttttgattcttttctttctgctgaacagtttcacgatggcagcaaatatctcgaaacttgaagcaattattgataatacaccgaattcttccccagacccagaagtttctcacaagttatgggtgtcctctttaaacaaatttcaatacacacttcctcttttgattagtaactttgctgggctcggaattgcgttcatttactgcctgatcgctttcattcgagaaatgtcgcatccttcatccaggaaagacacaatggagcacgggttgcccataattttgtgctctacgttgatgcttgttggaaacatcctttactatttcttgtcgaaacatccgcttaaagtcaccgttccagaggatttggtgcaaattcctatgcaacaaatgtccagtcccgctcaagaagcaccttaattggccgtatattttgtttcaattatgtttttgaagtgcttgtctaatataataaggagaatgccataatcggtgacattgtgagccgagtttttgaggcagacatgtagaatagatgataatttgtattttattaattaatctgtgaatgatatattaaatgaattgaagttcaaaatgaaatatgaagaggtgtcgaaaatataggaatagtacaaaccagtatatcgaacagtgctctaaattttggaagatgagttcgttcagggtcgatgtattcaacacacttccatttcgcattacgagacaagtttatgaaacgaatacgttttagataaaaatagtattgaattattaagttaatttttagattagtagtgacttaaatgttgaataaatattaaaggagtaataagattaaaggcagcggaatggaaacgaaatattttataacaaagtgaaacaggcgtaaaggaataggtgcccaaaagcgatatatgaaggtgttattaatacctctgatatggagaagagttgaatgtatcttctcttgctttaagattctcttgaaagtcctcaacttcacctcgtcgaatttcaactgtcagtttacgagaacctataaagagcatcgcaagtactatgagtatgagtaaagcatttacgacagcatcgatcatagcaattacttgaatagctgatggaaaacctttaaagatgaaagtaaacacaagaatgaaaagacggcaagacacgatgaaggagataaaagacataaacaaaaagtcataattatcagctcgttccttaccggcttcatacgttttcttttcaattagttttttgtatgtggcacctttaagtaacgactggagttcccatagttgaatggatttctttggattcatatttttgtgggaggcaaaacagctagtttgaacaaatccgtttaaaaacaagaaaaattgcgaaaaaatattaatatgaaataaaatgcttaaaagtcaaaggatttcgacaatcgttgttaatgagtaattggagcgcaagaccagaggtttaacgattttgatattcaaccaatatattcaatttctctgcctacacaatcccgacctaaatattctgtattatttgataaatatttattcttcttatgcaaaagcattttcattttctggccaatatctgctaaattttgtgttatatttatcaacatgacacaacctgacattgaaatagttatcaaggaggattttacctatagggagtgttcagatgttgcgaacgatgtgtttaaaaaaactcaatggctcttgtacgttttccttttcataatttttgccaattgtgttgttgatgttaagtattattttgagggatttagtcattcattattattcgtctattttttcttgactttaataattcttcttgtaagttttatgggatttcattatttgaatagtattcctaagccggaagctgaacctgactatcgaaagaagcaagagtcaaagaatcaggatttccttaaaagtcaatctaatgaacctttagagtacgcctcatcctctgcagttgaactagaaaaagaaaaaaatacgcgagagggcttaacaattcttgaatctagttaattttgtatccatttggcatttgcatcgaccttgtttttgttttgtgttatgtttataggtttattatttatattcttccttggtgtgacaattttttttctttaaaacaaaagaaattaaagaatttgtattttatttatttttccattttgaactaccatattgaatgtattctcaaattattagtatacaggtgtaatgtcactcatttgaatgtaatcagaagaaaagttattctcttgttcaagatccctttgaaactcctcaacttctcctcgtcgaatctcaatttgagctttcgagaattatagaatagcaagctaacaactgagaatgaaatctactgttaaatctgacacatctactttcacggttttaagagacttaaagccatcagacataattgctatcataatgagtaagcggaaatccacgtagcatagtccaggaagaaatccaaaccataaatagttttcgtgatgtccctttgaaatttcatctgattttttctcaatcagtttttcgtacgcagtacctcaatgcagcgactggaattcgtacagtttaatggattcacttggactcatcatatatgatacaagcaaaatagccacgtcaacaaagttcttctaatgtctgaaaatcaattcagttatcagattgaaatattgctatcaattcaagtcgaataataggaaaatctttctctgtggttgatgatttaaatatttaaaccagaccaggggtttcacaatttagttaagagttacatttacggacttttctttccacaaacctcactttttactgttttattttttgaattttgctggacatttttttaaatagcttccatttcttgctaaacttgtttaagtattcatttgtattcgttttaattgatagaggcattgaacgttgagtcgaaatgaaggagttaatctataaaccgcgttcacaatttttgccaatatttttacttggtctttgaacgttctatttttcttgtttcttgtgacacgtgccgttcacattgcattttaactaagaaacatggccacagtatggccgttctaaagatgatgctcctaagattgatcaaaagtaaagaacattgttatactatggttatctcttttgcagtgttatccatccactatgcttgtgaatgctttttgtatcctaaattgtttgattctcagcgctctccttcaccttttttacgttggttgttttcagttctaggtgttttaatgtctatggatgtgttttgtattttatacgcctatccaagtgtttatttacactatgtaagcgaagaacctaaaaaaaaattagagaatccagtctcagcaattaaaatcgaaatgaaatttcatgaagtcatactttcttcctataaatggatgtaaataatttttcgtaaaggaagtatattcatcgtaaatcttaattttctatttcgcttgtcattcgatgtcgattttgttttccctacgagtcaaatgtcaatctcaactagatggtttaagaattaaacaccctctaattcctcccttccttttcttgatgttgaaatttctttctcattactacaattcataaactcctatcaactagagagaattgcggttgataagtttttcaaaggttagcaaaacggtatatgcataaagtcccatatacaattcaaatataaaaaattaattgttcttttcatcgttgatttcgttccaaatttgctcgatagtcttccacttcacctcgtcgaatctcaacgttgagcttgcgagaactgaagtaaagtatgactataatacacactaaagctatgctgtttatgatagcatcggctacagcaggcagttcacagtacgtatttttgttgaagagacttataaagaatatgatcattcgacttataacaaaagagaaaataaataaagtaataataattggtaaaataccatcattactccgatatttaatagcttcatatgtttttttattaattaactcttcatatgcttcgtcctgaagcagcgactggaattcttgcaactcgatggattcctttgggctcatatctttcgtctaacaaaacgcagttaattgaacacttttaaatcacgaaatttgaaaatataagaaaaatggatttttcagtagctgaaaacttaatttaattgaatttcattatttgtggttaatagattgtgcacgcagtagttagcaggggtttgaagagaagttagccttttcaatctcactgttcgggaaaggcatttcattttcctatgtctattgttgactcaagattggtaaatgtttacaattaagaataaagtttaatttccaatagctgaatttgcatctttctttctctttcgtttcgatatggcgtccttggacattcatttatatgtgaagaaggatttaacctacggagagtgtgtaagggtcgcaaaagaaaagtataagataattcaccggcttctatatatttctattattttccttttcctcaattacgttgtcgacattgtgtgttatgtaaaaaattacaatggtttttcttttttttgttgggtttttttgaatcttggcgttataggtataataataacggtgattatctattatatttctattcctaaaccagatgctgagtctgagtttttaaacaaaccagactcattgaaccagaacgttggtgaaagtcaatctaatgaacctccaaagtacacttcaacctttatggatgagcttgataaacaggattaaaggagtacaaaaatggttagtcaattgatctgaagcgcaatgatcaacctttggtaaagccaaatccttttactgttgaagtttatcgctaaatttttgctagacttaacaaacttcaattcttcgtacctttttactaatatatttaattcattttaaaaataattcaaacacttttgtttaacggaatcaacggcatcgtcagctggttgtatcggtagtgtcaaatagttttcctatgtttgtaatgaaattttttgttttttaattctgtacttctgtaacaattgtaattgttctatggctatttttttcccgtataataatctgaaatttttgccagaatatattctcaatattttggaatttttttactattttacaatccaacaaactcgaattttacgataaatgcttttctaagagccatgcaaaaattttattataatgttttaatattttttgatataatataaaaataataaactgcaatggctatttattgactgatattagtattataattttcatacaactataaaaatacattggcaaaaaagaaaaaatattgaaaaatcctaaatagatacgatgaaatcgatttctaacaaaaattaaaattaaaataaaaaactaagaaaaaaaaaaaaaatcaaacagttacataagaacctagctatttttttccaaactccttcctatttattgtattcttttcaaacatataaagagacgtacagcaatcactatccataaataacgataaaagcagcattatgggtaaatgaatttgtgaaattcaccaacttgccaaaaattgcttacatattctcgttaactggctttaccggttccgggtacaattcattaaccaatcggttggacgtaatgactaaatagcccataagaaatatagacagaaaaaaagggaaaataaacgtgaaaattaccaaatctaagcattctcaatttatgaaatgcttggtcttttagttggaattgtgctgtactggtgcgaccgagcttcgaaatcggcgaaggaaaaaactcaaaagaagcaaacgtctaccgtttcacgaaagaagagtaaaaaaactgcatcgaaaaaaaattctggaaattcaaaagcattaattgtaaaaaaaaattaagtactattcttttgcatgtactgctcgattcaatgtttaatgacactcctttcatcaatctgttcatctccactctacaatctatttattcatttgatacatactctcatataggattttgaaaaatatactcattactatacaatattataattaagggagaataaaaaagaaataaaaaaaaccaaaggagccagttcaagtaggaattacttgtgcaaaagcccttcaagtactagtaaaagtaactagtagagaatgacttggctgcatctaaaacatccttaaagttcaggcataacgaaaacaataacagcaaagaaaaagaaagacgcaaaaagttcaaaaggaaaaagaaccaaacatggtttagaagcgagaaacaaccaaaaaaagtattgcggggttgtaaaaaaagaaaggtcctttacaacttttcaatgtctttcccttcatcctctttcaaaatgttttacttgacgactgactttacagctcctgactaggctttccagtgcgaccagaagttttgggcaaaagatgggcgttgatgttgggaacaacaccaccttgagcaatggtaacgtgaccaagaagtttgttcaactcttcatcgttacggatggcgagttgaagatgacggggaatgatacgagtcttcttgttgtcacgagcagcgtttccagccaattcgagaatttcagcagccaaatattccaaaacggcggccaagtaaacgggagcaccagcaccaacacgttgagcatagttacccttacgtaacaaacgatggacacgaccaacggggaaagccaaaccggccttggcagaacgggattgagcagatttggcaacagcagccttaccaccagatttacctccagacatgacgaaaaatactgaaactaaataaaaaaaataaaagtttgagttaaaaaaaaaagatttttccttctttaatgaaaaaagataacagtcaacgatgaagcagcgaatggatcaaatttggtgaaattaacagaattttctcgcaatttcagcctttacggacaatcaatctccttatcaactaaggatcaattgtttatatcaatttcaatacgtgtatggatcaaaaggtatcctaaacaacgaaaagtcgcgatatagggaaaaggagacataggagcgcgcacccttcatatatatactaattctaatcttccgtataagcacgtctaacgcgttcttgtagatgacgtttccgcgtcgcatggctaaacaccagggttagggttgtgatgcccaagttgtatataaccatcgcgtcgcctgcaggcatgttagttaataccaacaacttgatattgcacgaaagtttaggattatcaaattcctacaattgcaattacttagttcagtccatcaattttgagattctctcgacaaccaatttttaaatcgtaaaaaatgtctgctgctgaaaagaaacccgcttccaaggctcccgccggtaaggctcctagggataccatgaagtctgctgataagaagcgtggtaaaaacagaaaggaaacttattcatcctatatttacaaggtgttgaagcaagttcaccctgatactggtatttccaaccaagccatgcgtatcttgaactctttcgtcaacgatatttttgagcgtattgccactgaggcttccaagcttgctgcttacaacaagaagtccactatttcttcccgtgaaatccagactgctgttcgtttgattcttcccggtgagttagccaagcacgccgttaccgaaggtaccaaatccgtcaccaagtattcttcttctgctcagtaagcgaatcgcacgattgtgcaatcgtcttttagtcagctgatgagtttccacagccttccatttcgacaatgacaacctcacgaaacaaaagggggtaggttatttgctcttttggaaatatatattttcctcctcccttttttaacgttttcgttccctcctcttttccatttccgccttttgtatcgcattcctattttattccccgtacaatgacgacaacaacaacacaggtgcagcacatcacgcgatagttttttttacattacacatggttcttcatttctatgaccggttcgtggagttgaaaggtgttttgttttgcacaagtcgtactggatcaaattgggttttgtgttcgattcgacggggacgagatgctttttcttcccttggttaatcttcttcccttgtgcattttatagctatcaccactggttggagagttgagtttcttttttttcgactgtttgttcctttccgccatgtatggaaataatttgtgtcattggcactcatacagacacttctcacactccatttcccgttccactcctgggcatcttggtttattaatggatttattattattattattgtttatgttggtgatttagattgatggtgaatggaatattattattcacattcaaaatatcccaaagaatccagtgtgcgaagttgatgtggtttggtatgtttgctatgcaaatgattttatatatgtttggaaagattgtaaagtaattctactattaataataatataatattatgaaaagatcatttcaataaactgaaacttgagtcgtgttttcgtagctgtttccgtagtcggacttatggagctggcttctgcctttctttggatttgttgtagcaagtcgagtatggtaggtggaaggcatttatttaagaaatgcgaaatactaggaatgtcgtggaaaaaggcatatggtgagtgtaaagcaaactgagcgagcatacaagacgttgtggctatcatccaatctgccgcttcattaggaggcatggagtcttttaattctaagtatatggtttctagagtggaaaacaattggaaggtcggtggttgaatgctcaacttggatatggaagagggtgtggtattggaaaaactggtatcccgtatggccaacaatttataaagatcttgcaagtttcgaagagattttgaaattctcggatcgagggagggagaaacctcgttaagaggaaatgtctgtaagagaaacttttggtaaggtaccaaacgtgaacgcaagtttaacagtcgagttacgaagtgtaaaacatcagagcgggtaatggaggtagagaaaacaggtagagaggttgtcattttagaagcaagctttttcatatcatgctggttacggtgctgcacgaaatcaattagggtagaagaagcaagagaccatacatcggactcccagttcgccatcgaaacgctcatactggggaaccttgcattcgcatacaaaaccttataaaacgcatgatgaatctctcgaacaatctcttcacgatgaggtggtatgtacagcttattcaattctcgtaatacatccacaaccattaattccggttccaatacctggttttcattggcatctacaatgaacatctcttctatattagctgatttggattgaggcgcatgttggagcatccatgtatcaacaatacaacgggtagcggccatagaaaatactgttcttatgcgtttgggaagcaaatcagcaactctttggaagtaatgtaattgaataagaacaaaggctccatccatttctaaacgctcaccacgttcacccacaaaagaataaaccatttccaaacactgagaattcaacttctcaaccactacacccatttgcttcgggtcacgcccataatgcttggcggcttctggatagctagcttgttgaatgccactaatgaattctttggcatacagttcaacttccttgatttcacgaacaatttttaaaacacatgcattcgcccattcgataagctgcattcctgcaaaaacttcaggtcgtcccctaagtgtataatccaaattgcatccacgagccacagcacgccaaaccagcatgggcgatgcacgcgtgcacgataatttagaaaagtcttcttgtctagacttaattattttttcaaaataggaaaatctttccttcataagattgtacaaatatttttgttgactgactgtagcatatagtacagggtcccgtccgctaatgggattgggttttaatttaagcaaatcgcataatgtacggacaacaaaagcaaaatctccttgactttgtaaaatttgattccagatagaggcgcaaatgccatctatagtggcttgaataatttcccaagcatgatcaactaaatacacgagctttggattgacctttgctaaacgttcgcgatctttttcatataattttttagcattttcaatctcctgcattaataaactatatttttcttgtttgtgatataagcgaaatttctcagggtatgtgaatagagcctcacactcccgcatgaccaatagttcaccgtaagaaatatcgacctcattagttgattctgtgttgaaaagctgaagttgctgaagtgcgcctgagattgattcttcgcacatatccattgtcttagcgggtccagcatgactcaaggtgctgataatttgagcataaacattatctatagtttccttcgcggcaataaatttattaaagtttgtttccatcaacgataataactgatgagttccatcggtggttaaccacgaagatgatcgatgaactcccgtactcgtctgttgcatagagttatcaggagcatcgcgatatgtcccagcgattttacgtgtagccatcgggtttctcatacctccaatagctatttgagatgacatagatggttggacgctcgtttgactacgtttcattgcaaatgatggtgttactggtccagctgcactagcatctttggtagtttcggatgtagcgctaaaatcgttagagaaaaataaattcaccagtttctttgtaattatttctaaacaaaatacttacccacccgtacgaagtatgtcttctgaacgattacgttcatgatgaacaccggtagtaggactttgtacatctactgaggcattggcaatcgcaaagtccggcttctcagtccagtagtcttgacttaaacttgtcaaaccataatgagcaaggatctcttcgtctgcactcattttctgaaaagagacccttcacctgttgtattatggtagttggcagagaacgcaatgccacagtaattggaattcatcaaagcgatcgattttttaatccctttggtccatagatcattcttttatacttttaaaatttccaattaagcttaaattgcatgttcctaaattgaatcaagtagaacaagtatttttcgaatttgtaaatatgtacgcatttaagagattcactaagtttgcaaatccaaaaaaaattcttaaccgattactgaagcatatgtatttgataaatttgtggaatctgttagttctgtaatacttctgagttgagcttttcataaacaaatatagtacaaaaattaactataaaccttttgttaccaacctgattgttataaattatttaaatcctcatttattaattaaacctccagggaggaaacctcccaaatggaatttctgtaaataaaatatattaaccatgtgattctcaacattaacgggtcgatgagttcatttgagctttatagaaacttgaaataagttaatcgctatttaatagcttaataaatatgtgcaattttcttttgaaggattttgtattcattataaaataaataatttaactcagtttcaagttgttataatgagacgtgagagatttatatatactatcaaaatttttttattaaattttgaattattttaaataatttaaagcgatataattttcaatgatatacggtacaaacgaaatctaaaaactaaaatattcaatttgtagacaacatgcccgaaatttcacattgtagtttcacagttaggataattaagtttggtaaaaatattttttaagcgctattttttaaataaaaatatttatcaaattcaatatatttagtgcatattcgtcgctttatttacatgtggatagcataattaaataatgatgagcagttggttcaatgtagggattttgtgtttattaagatttaaaaacgttcaagataataaaattatattcgaagctatttttgaagtatttttgcacttcctcaaaattcccgtgtatatgacccatctcggatttccaatcacacctaccgtttgcctcatcgaaatgttgggccttttgctattattacttataccagcacttttcaccttaatttggatatataaatacattgaaccacattctttaatttcaattcctggaattttcgtatttttaggcttatatgtaccattcgttgtaacgttgttaattcctatcgacgtaacttgggtaggtagctaaatatcatacaaatacagaattggaagtcatctaattgttcaagtactatatagggcctctaaaagccttcttgaacttgttgcgagattgattacactttatcgaaattacttcaagctttatgaatacaattattactcttctactgatttcatggtttaaattttactaacttatttgtaggatgtttcactctcaatatggcgattcctatattggttaacattcgtgctcagttggatcatcttaccttttgtccaaggttatatggaaagtaaattttcaacgccgagaagtcgtcttagtgattctttttacaaaaaccttagatattatttacttttgacatttttgacatgtgtcgtaattgcgtacttgcgattcgccttgcgaactatgtctttctccaactttaaagaattggtgatttcccttacatacttttggggactcttatttgtcatatttcttctgggaaatggttttgtgtatgtcccggttagtatgtggaaaaaggcatttattacaaaacgtgccgcgcttcttgagcgccaggctgtcggagtatacagcaaacttcaagctcggctcgagagctactctttaccatcttcatccattagcttaaataacggccggaatcaatctagcagcgatttttttacttcatctcttactgatcacgcattcaatcctcacagttctccaaatggaatgtctaacgtgatcgctttacaaactacttggaatcaaatggtaaaagaatataatcgtattatgctgatcaaaactgctaaagcatctggctcttatcgtctatacttaccagactcatatattccaatacaccctgtcgttgcatatgcattttacgtttggattcttccagcttttagaattttgttctcaatatttatggcttcaatgagtgtaatcattgtggtatcagaagtgtttttgcacactcaatattccttggttggtattatcttacaaaagtttaccaattcgtctgccacttctatttttgtatcgtttttatttgtttattacatgcgatactgcacgtacaaatccttgatgcgaactcaatttgcgccacattactattatgcattagttcctttccgagctacaaatacggcctccttgatatacttcgcatctcaactttgtcgcttaacgcttcctctttgttataactttgtttctctacaaccttatcccacccaattccatcaattctatggtgagagtattgacctcttaccacttggaaatcttattagcaaacgttatccaacctttatactactgccgattattttttctatgatttctttaaaatataggttgcgacaattcatttattccattacgctgcgcaaatcatccagtgccagctcttccgatgactttgatgattcatcactgaattcagaaaacgatgatgatctgtttaatgaaacctcggctgcctatttagctgaaggcagagcccttcttttgggtacaaataatgcccatgtttaatttaccgttatgagccctatgtattttaataatttagtctattcttcacatttttaacagcaattgttatttctcaactattttcttatacaagtctatcatttacataacgttaaaaaattctttttagtaaattcttcaaaggattctcataaataataatttcatacagctatcaaataccagttaaaattaattgaataaaggaggcgccttgagcggaactagaaaatcaaatgatccttttattacatgaaaagtctacataattacgggtacttcgtattcgaagcatctgtgagaataattcaaagactgatttattttttttcgtatgcatcataatcatctaatagattcatagctttttaaaaaaattggtaaagtagaagaggtacagaaaagcgagtgacttgaaaaaacatatacagatacagtgaatcaaaaatgcctaaacatttcacgaatgaagtctaccaccagtcaccaacggcttgcatggcagtagcaaccttcaagaaaccagcaatgttggcaccatcgacaagactgggaatgttgttagagccagagtcacaatacttggaggcgacatcggtggattgttcaaagatgttttgcataattccagccaatttagcgtcaacctcggcatgagtccaggtagagaattgagcattttgagccatttccaagccagaaacggcgacaccaccagcattggcagccttaccaggagcaagccagcaaccctcaccagaagcacgagacttctcaaagacttcaacggcctcagcagaagaacccatgttggagccctcagcaacgtagcgacatccttgtttgataagagcggcggcttcctcaccgctaacttcgttttgagttgcacaaggcaaagcaatgtcaatttcaccaacattagtccagggacgagcaccggcgatgtagtgatgcttcttgcaaagagaagcagagtcggcaatgctggcacgcttctcctttagagccataatttcatggatctcttcagggacaaggccttcagcggtctttgcaattaggacacctttagagtcactgatactcttaacaatagcgccttcttgaatgcacttcaaggcagcatattgagcaacgttgccgctaccggagatggcaacacgcttgcccttcaaggtctcggcacccttggtgcggtgttcaatcatgtgcttaacatagtaaacgacaccgtagccagtggcttcaggacgaatgttgctaccgccggtaagcatgtgcttgccggtgacgacaccactgtactcattgcgaagacgcttgtactcaccaaacatgtgcataacgacaaaacctgtgacaccaatatcaccagccggtacatcagtttgaggaccgatatagcggaaaagctgacgcatgaaagcttgcgagaagcgacgaatctcgttgtcggatttgcccttggggtcgaagtcagaaccacctttgccaccacccatgggaaggcccgtcaaggcattcttgaaaatttgttcaaagcccaagaacttgaggatgctcaagttgacggaaggatggaaacgcaatccacccttgtaggggcccaaagccgagttgaattggacacggtagccggtgttaacacggcagttacctttatcgtcctcccatgtgacgcggaattctaagacacgttcgggaatggaaatgattggaagcacacgcttcaactcgggatgaacttcaaagagcttggagctctcgatggagcccacaatctccttgtaggcttgttgaaattcaggttcgtatggggtactcatggtgggccaaaaaagtaaacaaaatcgaaggtagtgatatagagtgtatatctatataataatgataagtttagagaattcgagatatcaaaaaaaggcgacctcgaaaacttttaacaatacaaatacaggctgtacaatccaaagttctatacaaatccgtattcgacgccttcaacgcaaagactttcaaaatttaactacaatccaacaaaactcttacaacgtgagtatgtaagagatatcgatccgggttcaaaacgcttaccagatgtaccagtgcagtgtagcaggaggattcagggacgtgctggccatgtctgctatatttatacacttaacaagcaataatcaacagtcacaccagataccttgttttttgggagaccatacgtttgctaatggctgacgacttgcaataaacctgatggaagagcgatggcggagataacagacgaataggatgtaagtatgatgtcaaaatctccaatcacaatgctcctatatatctcttttctctataattggatagtggaaaagaagattacttaagcggaaaatttccgatctgataagccaaccccctcacagaattccttcgtctcctgctcaaccaaataaagataagataagcattgcttaatgattggtccgtgcaacggctatcacccaccctactgaaaatgtggggaaaacgcagctcctccgggaaaatccatggaattatagaagatccttagtgggatggggtgcttgggggggggggaaagatgtttttagatgaaaaaaaaatgttttagagaggttaatgttgtaatatagaagattttcgctttctgttgattaacagtttctataatttttttaagaaaaaaaatctggaaaagtccaagtcctttgttaatctaatctcgttccaatctctcacatccatttaaagggtctattctttactcctttcagttgctgcccccttactgataacaaggataactaaggatagtaccaaaagaaaaaaacgctaaatactgaaataggtcgaatcacactgaaacgggtaggttcttccaggcagaccaaatcgcaaatacatatccgaaaattcgagtaaacggccttgcctcggttttacagtatggactaaacattcgctcatccaaacgtattgcgccttagcagccatagtcatgactagctttcaatagaaaaaagacaaacgaaacagagtcatgaaattcgtagcgtagatgtaagttagaaaaatttcaaatttctttattttttggtcttctgataacccactatcccactatcgtttgtccatttattccttgcccgatcatgtggctgtttgctttgaatctaaaattggatagaaaatagttcattcgaaagattagcgaaactacgaaacaaggtgcgatcgtcgttgtgctcggtagcaagatgagtttgttttttagtataatttaggtagctgccagcctcgtttcgtcaacttagctaaattcgttgagtctgactcattgaatgtaggtaaaatggctcatctaaatcgaaacaagttgaatcgagtacagccttagtcaaatcaaataatgccaagatgaaaaaagtcgagcctttgccaatataattttatgcgatgtaatggaattctttgcctgatttttaggctctttgtattttcttttaaaacacggaaaattctaaaactggtaaccacttttattatcgttaaatgatggaaatcaatggttttttagctccttttttcggttgattcaagtgtaacaaattgtccaaagaagggagtggttcctcttgtgtctcggttttcccgctgccttgttgcccaagcaaatcattgaaaacagtctccgacgtctttgctccgacaggttccaaaacttcatgtgttcggcgatatgtacgttgaacacgttgctttcccggaattaacaattcagtagagaaagtgtcaatcatttgagaccctcgaacttctctctcataatacactgcgtcgggattttgcttggaaaatgcgttccaagtttcttccaccaatgattcatcccccgcatacttttgagacatgtgagtaatggctcgtatgatgggtgccgttatccccataagcttcaaatacactacaatgctcaatttgttagccacacatgctgaagttacttttagcattgccctttgcaaacgatgctcactagaatatgttcgagcaacattgaaaagatgccaacgttggcacaacgtctccaatcgtggaagcaaatcttggcgaatcctagatgtcataaaatcatctgcaagggcgcaaacttgatatatagtttctaatgcgcattctactagcagttcgttatccgtgtcaagctgaataacgaccaatggccaaaatgtattaatagcaggataaaatgtgtttggctccttagccaaaacattgcttccatagctcaacaattttaacatttccactcgtatcgtaatttgttcatgtgataagaataactgcgccttttccgtgattttccttaccatatcgacgacatcatctttttgcttttctccttgttcgtccataacattactatttatgttttcatgatcaactgtggtctcacccatattttcattttctttgcccttcttttctttttccttcattgcatgttcgcgaaactgttcatgtccacttttcgtttcttgttgttcatcgtgtatcatatcctctagttcatgatcatcttttggaagaggataattagggttctctaatagtagttgaacgaattcgcgaatctttttacatggcttatttttatcctcgttcattgcgtcctcctccaccccgacgatgagctttttctcctcgccatttatactttcttgctttattatggcataaagaattccaagcaacccttctgtaagccgtgcgtaaccatggtaagcatccaaaatcccaaaaatagcatccactacatctccaatgtaccgaatgcatcctccatcgtcattctttattacataagccatcacaattggaagttgaggtgatacgtctaatgtgttcaatttgagggcaactgagttgaccacatagtcaatattttctctaagtaactctgctggcgtcgagtagttgcaatttgtcgcaattgcttgaatacatgcctctgcaaacgaagatacataaggagaagcaaacgccaaatgttcaaggagaggataaaaatatgccattaattttgatcgaaactttactccttgtaaagaagaaatccagctaatgctgtcaatagcaatgcaagaacgaacacacaaaagattatacttttcctttttctgcttatcctccaacgatgctttcgtaaagacatttaattgcgataattgttgcaatacttcgaatgaatattgctctaatgaatcaatatacatttccaaactgtccaccgtttctacgtcacttttcaaaagtaccataaatgcccaaaatgcacgaaccgagttttcatttgttgctgaggtagccttagaaagtaaggactgcataacatatttaacattaggtgcctttgcgaagcttgtaacaatctcttgtgttgttctttccatctcatttccaccaaaaaattcaccatggatgtactcattcgaagtactggatgttaaaagcttctgcgaattggaatcaattcccgatgactttggtacaagttggctgagtataccatccagtaaaggctccatgagctgcaaagtcttaggaagatgactggatatacttaagagacttttcaatcggttcaactcctccaatttattatcttctgaagcaaaagtggaaacactagaccatgtagtagaccaatcatttaggcattcagttaatactgattccatagtaatattgttgaatgattcaatgagagaaacgagtttgttcatcccatagtcccttaattttggattttcttttttattgatcaattttagcatgctctctagtaaatgaatcctacaatcttttagtgaatctaaacaatctctaaataggataaagcaaaaatcaaataaagcatcttgtacatgtaagttttgtgaagaacgaaggtgaagaattgccttgacggcattgcttaattgttggcaggtagcgcgtttccaagactttgtacgcttcgttgggccaaaaaaatgagaattagaagaagcatctttttcatctggcaaatcttttgtgttatcgtcactaatagctttcaccactgtatcacctaaaatattcaaagagatacacacgtttttaaaatactgacaggttccatttggcgccagtccctttgtcaatcccgatactatgccaggaagaaaagtagtaagaaattctgttggtaagcgatattgctttgggcatattagcttttggacgcaacacaatgaggcaaactgtaatctccgtgagctatttttatttggaataatatccaaagcactagaaagagctctcgcaaagagaagatactgtcttttatcgtgaaaattaggcttaaaatctgtaataacgttctcaagcgtttcgaaagtaatttctcgaacacgaaaatcttgttccacagtttccgaaggagatttccatccatctgctatattaagaagcatcaataatagttgcatcgtcaacatttcattatgagcttccctccaaccatgcttgtaaagcaaattcacgcactgaatggcatactccactcctgtacttgggacacgataccaggactttagtacaggtacaattggaaaaaatatgtaatcgcataaatttagtggtaaatcggcgtctgtattggtcaatgctttttccagcccaaagtacgcatccttcaacgagttctttaacccattggagtcaacagatgaagtttcagaagatagaggaagagaatagaagcttaactttcgaaaaggatctcgaatttgtgcgaaaatactctgtatatgagacatgtagagaaaccatgaagttatagagatggtaggtcatatacaagcaaaccatttaaaaatgcatacttttgcgattggaaatgtatatgatattacagtattctctaataaataattcaatattattcaaatgatttgaatatttaatgtcgtgctaaattatagcaagtgttttgactagatgcacagccaattcccagtcggttttcgtgagaaacattgaaaatatttagcaaaatgagttgcaatgatttgactttgttcttaaaaacttggaaagatatattgcaaaaagctgcaagttttagggttacattcaagttcttactgatgaccattactttgatctcaactaaaattttaaattaaagagagaatttttgaagctatgcaattacaataataataacttcgtagcctttcagccttttagcgtatctgtttacattgaattaaaaactcgatagtattattttatattttttaataaacattttaacgtgtgtgtcgaaagacatatatatagtataaataatttgtagctcaaattactttgctatgcagactaagactggtttaatgtgtgcaatggaagtagtggatgtattcactcaaatttataagggtataacctttttactagtctagttttgtagtttcaagcttctagtcctctatagtccttaaaaaagtcgttaagttcataaagacgatacaacttaagaggtagccaactcataagagattttctgctacatacctttaacaagcgaggaacacagtaatttctgaatttctatttgtagtcaaaaatcactgaattatcagtttgtttcaaaaacgagaggattgtttaaactaatttgcattttcttaaaccaaacttattgtaacttgaataatctctttaatctatttattttgaaggtcaatgaactcttagacagatatgaaaattgctcaaaataataccgtaagctttccaagaaactagatgctggtattttaaacagtatggatcaaaaacaagaaaaagttgaaactcataaatgcattcaactgcacgacatatttatttccttcatgttttgattttatatacttggaatacgtttcaccagatctttaacgttttcttacgcacttccataaaatctcacaccatggtgagacatgaaaataacgaaatttcaaagtcacttagaacaaactacaattaatgagttggttgtttaaataatctaataaaaaatgtcgtataaattagaccaactcactcgtcttcctgaaaacaagaaatgttttgattgtgatgctccaaatccacaatgggcatcttgtaatttgggaatcttcatttgtttggattgcagtggacagcatcgtggtttgggagtcgaaaagagctttgtccgcagtattaccatggacaattggagtgaacgtcaagtgaagatgatggaggtaagcatcaggattgatacgggctattggagtttgttggttattttaccaaaaaaaaaacatatatatataataattcatttggctgagagggtagcgctattgatctgcgagtttgcttgccgctatttcgaattttttccaagtcatttagtgcctttttttgacaagaataatgtttaatgttaaaaacaagtacatgacgcgcaattgattatcacctgaagttataaaatgcaagctcactataatttcatcaatgacttgaaacaacatatatagcccacatttgttgcatgctcctgactaacttctatacaggttggtggaaattctaatgctaaaacattcttgtctacagacccgatgttttctgctgccggaagtattcgtgaaaaagtatgatctttgaaccttctatattttttccagtttaccttattttgattttattcacattgactaacacattttaagtacaataccgacattgctgaggacctacgacaaaaaattcgtgccgaagtagatggtgtcgaatgggtcaaagttgatcgtcctaagagcgtttcctctcatgcttctgtaacttcatcttcaactgttccaactattccatcagtttcaaaagaagcaaatgataaatattttgcaaagcttggttccattaattcccaacgccctgatgatttacccccttcacaaggaggtcgctatcaagggtttggaagctctaactctgttaatcccaattcttctgctagaaataacggtggctcttttttggaccaattatcatctaatcctgtttctgcacttagtcatggttggaacatgttctccagatctgtttcccaacagattcaagacgtaaataagtcctatattcagccagggattacaaaggtacaaacattttattgtatccaaaaaataaagtttctgttgtactgactctgtttttaggttcaagatcccgaaacaaggaaggattacatgaatgccattaataatttctctagtaacgttcaggaaggtgctaagcaatcatttacacaacttaaatcctttttggatgaaaatgtatattccgaaaacccccaaaacacccgcggtacttatgatgcggaaatcgactctccttattcagctctcgctgcctctcctccacctgaagactattcgaaaaagaatttcgataagcacgattgacttttttattattaaactcgtaagcagtttgatatgtttcattgctgttaggagtgcctcgtctatcaagcattcgtcagctaaaacataaacgaagaacgctaccgataaaaaaaatattgctacttcattagaattatctgacatttgaagcttcttcaagtataatacatggggaactgaaaaaaaaagtttgtatatattgaagacggagtcttcttgtttatttctgttacaaaagtttcatcgttttaggcttatagttcaaaacaatgaaaaaaatgataataacatattttattttcattagcataagttgaatgccggctaaattttaagaagataaccggatcatgtgctttcttgaataaaaccaatgacttttttcttttttagtcgacgatgcctaatcggtatgtagagtggattttaaaagaaaacaggaaagacgaagatatgaggatataggcattgccggtcattttccaaaacaaaaatgctggtcataacataattaaatcaaaatgcttaaaagctcaatgataaaaatcattctaacaaaagacaataagtcattgacccatcaaatatggtcataaggcgcactgcctccagtgtctaagttagacaacggctggctagtagcattggctgattcgttactaactggtacgtaatactgatttgggtcatagtaataaacgaaaccgaaggggggagttgagacctgactagcaggtgaataagatcgtaaagtatcggcagcaggattggacattacattcatatcactgccagaaaatggaggaggcatataaggatagaccgcgggaacggtggaatcataattttgaggaaacgaccagtaagtcggcataacagagtaggattgatatgcaatcggactattggcagtaggtaaaggggttgtgtacatggttcccggtgctgcaggtgcattaccagcgggaacattggtcatggatggcatttcaccggtagtcatattcgcagaaatataagcttgctgagaatcatctcttgcacgtacattagagggatatatggaagtagggtacgtagcggaatcagcgctaggatgcatatccacaacaggagcgttagaagatcccggtgtggccgaaggggactttgaagttgatggaaattcctcttgaaatgagggtgaaggatacattttgtcatttgtaataggaaaatcgtaagggacaaatccaggaggagcagaatgagttggtacagtggctggaagaaaagccatatgtggatgggaagagacgttaggggaaaaaggaataggcggagctgcagaaggtaaaggggagaaaggtaagggatacattcccataggaggaacattcattttatgtttgggtgtaaccagtgctggttgggatccaggtatactgacgcgaagaactttgttctgatggagacggggattatgcacgacatggacaattttctttttaggttgaaaattgatggctttcatagaagagtttccaaactttacacggatatcgaggatccttgacgatttacgataccccgaattttttccctctttcccttgggaattaggaaaagaggtgttattaagaggctcctcaaaatactgcgtattaggagtataaccacctcgtttgtagttctgatatccataagccataccagcttcccttctggaaggcatggatgagggaacagataaatactgcggatccgcttccaaaggtttatacattgagaagggatagatattgccgggagcattatttaaaccaaaatatggcatggagtcaattcccccggtagcgtttataaaatatgtagaattttgtataggaggataaaagttttttcggttattgttataatcatctctcttgggttttcttcgatatccttgagaatttttgtaatacgtcctgttgttaccgtaatgggtttctcgtcggcttacaccaaatccattacttacaggtagctcatcaaagttctcagtctccaaaccaatttcctcggcggtgactttcatatttccttcttttcgcgatttaatatctgtggacgcgtcatcgttcgatggaacttcaggattttgattttcctcttgaacaattctttcgaccgcctccttctctctttcagcgcccaatcgttcaaattccgccatttctacctcaattttctccattttcttatttaaaattgaagtttcatcttcattcattattttaagtcaattcaaagcagaaatattcaattccgcttgaattccaatatccgtctactgtattgttaaggccgggtacattgctcgcgtatggcaatgaatacatagtgcatgctttagcttgcggaccgtaaaatgtaaaataacattacgcgttctaacgcattgataagattacttagcaggttgcaatgcggaaatcttaagataatagaaatctagaatattaccattgtttctagtagtattaacaattaaaataggaaaataaattaattaaataatattcaaagatgaaacgaccgattagattaatagaaacgtggcttgtagttagatcgccggattatttatttatatgagttccaaaaaaaaaaacagaaaaagagtatttatagaatcattatatcgggtagtatatgtacatatttgagcacaattcaacaatattagcacattataaaaaagtaaggctggtaaattgggatttggatggaaaaccctgaagcgtcgttgcatcagctgagatggataaagtagacgagacgacgccaataggagacattcatattaaaaagtgtgttgtagtatccggctttgatacaatccgttcaggttgagtgtccctgcgccgcttcatggggatgtccacgctttcaatgactccattgtgtgttatgtagtccataaatcattttaggacgatcgtagtttaaaagcaaacaacgagtcaaagtggattgatgctcttaatcgttttataaataaaaacccaattaatagaaaaaaaaagagtcttaattatttgatgaaaccttcatgatatactcataaaatgtgaactactcaagaatcataagcacgtggggataaatattcaatggtagccgaaggaaataaaaagtgccgaggtactttaactagcacctctggaccgaagcctgtgcccccatttttccctaacaggagagtgatcttcaaaatcataaatgttattttcatttttcatgattcgacgttttttgatgccgacattttcagcttttgttaagttgacctctttattattattcctcccattcgaaattccactcttagagcttgcaaagtgctgatctatatattctaaatcattttttcttcgatacgctttcatttcttcatgttgtatgttatattttaaaggtacctttgtagtatctggtttctcattttccatagagagtcgtttgtaagaaaacgtatgaagcaggctatattcggctgcctttttttctttctcaccaacagaaaattctagggaattttgaggaacgactttttgaatctgttgtttgagatttgatgaagagggggacaacaagtcgtcaagttgaaaactgtcgtcattgcttgagggcgaaagtatcaagtttgaaaattctggtaaagagtctaccctagtgtctaccctagtgtctaacgccgtggatggagtcatgtcggtttgcgatatatcaacctctctttcattcactgcattcagcggttgaagttcgagttcatgtattgaagcttcagcatcagaattcgccgtttccaataaattaaagtcgttatagcaaatagaatcacttggtctaaaaccttgatcgccccaagtagtaaataatgtggtgtccgtattttcgcaattggcttcacctccaaagttaaacgtttctttactcaacgcaatattctcaaaattggagtgattcaaaaagaagcttggtgtccaattgatagcaaatgaaaacaacgcctgaaagatcaactgttcgagaacgaatgacttgattttaggacgaacgacaatgtcctcacgaaacgtagttgcatgtaaacttgacagaaaattacacctagtattttctcgcttcttgaaagccttaattatcgagcgccagctgggtgcctttttagtactcttaatcctcttttttactaactgaaaagagcaattattctttcctgtttgtatttgagattcttgacatttcttaatgatattatgattagttgaaatcacaacgccaatgaaattagactgatgctgataagagttatttgcaggtttaggccccgaatctataagcttcgtttgtaggtgtgaaaaacaattgcaagatgggtgtttagcgctacgtctatgatggtaagtaatccaggcgccaaacttttgtacaaagtcaacacaaatctcatccaaatccggaggtaccatcgtatatgctgagttatagccattattttttgatatttttacgggttcattataaatgtctataattatatcgcaatctcgtaaaatctgcgcacgaatataaagataattaagcaattcttcaaatccatccaattcttgttctgtaaacgcattgatatcaaacaatctaccagtttcatattcagcaattatatcatcaattccatcacgactcgaattatctgggaacgcaaggtaaaaatgtatagctgtgtaccacattatgctctcgaaatatggatactgatactctttttcaattcccaattgtagctcaagattgtagattgacaactggggatagatatgaaggaacgttaagaaattaccagcaatagaaattgtatcacaaggtgtcacaacggcataaatccatcctgaaggaaccaaaattgtttgctgcgaatgaacttcgacgcagtagcatacatcaaccatattgggtagaaactttttgtcgctgtcatttgaagatgttagccaggctgtataagcttcccaattcttagatgttcctggaataaggtaaaatatcttacatccgtctagaatattgtagtaagctgaggatccaccaaattcaatatggaattcagtatacgagttttccgctgacattaagcagtaagtatcaacatggggatactcacccaacgcaaaggaaccaggaggccagacagtattaaccaaatcgagatcacgaacgatgttaggcttccggacgtaataggcaagttttgttgtagaaacctctaagctcaagacgtcgtatattcgaccacgtttgctgggctcgaggctcatgtactttacccaactttccatgtccattttatttggaatttgtttttgtgtcacaacatccacaagggcgagcggacaatcataaccaattaaagtagcgattttactcagatttagttgccgcgtattttgtgtatcagacgaaggaaatattgtgggttcattaaatccagtatccctaaaataactaaaatttacactttcggcaggcatacgacgaaagccgtcttgtggaaaagacatgccaagtaatctttgatggtttttatgaagattgggatgtctttttcgacgacgattacgactaaggcatcgtgatcttgttttgtctacagattgtctctcactgaagtgaggctgtgcaaaggaaggtgcatcaagcaaatatgtatcctgaaattctgtatctaccgagacaggtgaagtatcaaaaggattgacgtattgagggtttatgcaggataaatgtgattttgtcgcaataggagttgactggtttccgcaccatgaaatttcctctttcgaagaaataaacgagtctattgagtttaaagagttttctaaaagggaagagtgtacaccaacgcagagagtgcctgaaccactcaggtcattgctaggaatatcaatgtcttgatttataatgtcatcgtattcaagccaggaatccatcttaaaagtcccaaaaattaattgcttactagcaaaaaggtaactataaaattgcgatgcaaactaaggagattctatggctgtgttctttgaaaaaaaaaatgagtttaaaactgctagtgactagtaatatagcattacatataataacagaaatgataagtatccaaaaaaaagcaggcaaactcgttagatttgagtctaactttttcttcaaaatgccaataaaaccgaactctcagtcaacaataatgatgatcctctaattcaacctgaagctttgttcaagaaacgaaataatatcaattataaataagcagtaatccatagacttcaaaacgtccactccataagcttgcgtgtctcttttatacgatttagcacaagcgcacttctattgtgcagctttggaaagatgagccaattctaaagcttccgtagagttgagttacaaactacccagaatttttgaatagtaattaaatgttggtactacgcacgcgatattacaattacagacgctaggtctaagtgttaggaaaatgttactttttgttacttaaaccgagtatttacacacttgctaggtatatagttgcgtctttctaaacatttcttcaaaagcatacttgatgagtcaagaagaagaaattaaagaaagttctcctgaaaaggaccttaaacaagaggattctgaggaagctatggaggttgcatgaaaattagtaggcgcgcatatttctgcagctgggggcgtttttaacgctctaatcaatatgaaaaatatcaagtaagtatattcttaaagcaatcagcttgaatatgttgagaaagtgtacgttaggcttggcgtaatcgtgcattattgcgacttgcaaactgattcactagtagttattagcaaattgttagaggatttgctgatggtacgtctatttgtcgttttcaaaaaccatagcttatgctataaacttttctcacataattttgaaggaggtgactgatgtgtgcaataaacaaagcttatctgctaacgaaattttatatcagtgccaatagttgtgctttttttgtaaaatcacaaagaaaatggacctctccggatttatcggaggatgttgctcaaaaattcttggagacagcatccgaaatgaaattcgatgcgagcaaacaggttcttgtccatggaagctatctgattaacatggccaatgccgatgagcagaaaagagaacaggcattcaattgctttgtcgacgacctgaagcgctgtgaaagacttggtgttggtttgtacaattttcagtatgtcattcatagtgtgctctatttacttatattttacccaaaacgtactaactcttttgatctttgtagtcctggtagtactgcttcgtgtacaaaggaagaaggaatcaacaacttagcagaatgcatcaatcgtgcgcacgaagagaccaaaagcgttattatagttacagagaacatggctggtcagggaaattgtctgggagggacctttgatgactttgcagctttaaagtcaaagattaagaacttagaccgttggagggtttgcttggacacctgtcatacatttgctgcaggctacgatattcgcaccgaagagagctacaaaaaagttattgacgagtttgacgaaaaggttggagccaaatacgtgtctggatggcacttaaatgattccaaggctcctcttggtagcaatcgtgatttgcatgaaaacattggtttaggatttttaggattagagccttttcgactaataatgaatgattcacggtgggatgggatcccattagttttggagactcctgccaaatctccagagcaatggaagaaagaggttgaacttttacgatttatggtaggtaaatcatcagatgatgtcgaattaatgaaagaatcagcgcgtttgtccaatttaggagcagcatcccggaaggagcatttgaataaatttgaaaaaaaagaagcaaagaaggatagaaagaaaaaaagcaaggatggcgatcaaactactttgttactcagaaaaaagcaaaagcttggaaatgcagaagttaagagcttggatgaataaattcatgtaacatgcaatttaatgaaagataaatcaagggtacgatttaaaaatcctaaaatttgattcatgaattgcattcccagcattttattattgcctttatccactatattatgttttggcacaaatgacgttctcagtttcttcatttttacactgcctattttgcagtatttatcatttgattcaggaattattatcgaaagcaacttcggctcaattgactactttaaaggcatctttttgtttcaattatatccatattcttcgaacactggaatacggaatttttaatcatataacgatacattacttataattttatcattttaccatttcccatgagcaacgctgttcagtgctggactgctctaactttcgtccttgccctaccctaaagtgctaacacaacatgtgactgttctttttgggagtcactaaatttctcattttatgttagaagaatctctacaccacccaaaaactccaagcataaaaagatgtctacagtcaaggtcaacggagctaagaacggcggagaacgtatggtgttgcctgccggcgaggccgccgctaaatactatcctgcctaccgtgaaaacgtccccaagaaggctcgtaaggctgtacgccctaccaagctccgtgcttctttagcacccggaactgtttgcattttgttggctggacgcttccgtggtaagcgtgttgttgtcctcagtcaattggaggacactcttgtcgttactggcccttacaaggtcaacggtgtccctatccgtcgtgtcaaccaccgttatgtgattgctacctctgcccccaagatcgatgtctccggtgtctctgttgagaagttcaccaaggcttactttgccaagcaaaagcgtagcggacccgtcaagaaggatgaagctttcttcgccgagaacgctcccaagaacgctcttcccgctgagcgtattgctgaccaaaaggccgttgatgctaagcttctccctgctatcaaggctatccctaatatgaaggaatacctcgctgcttccttcgctttgtctaacggtgaccgtcctcacttgatgaagttttagattcataaccttaggtaaataggtaaatctatctttgtgttggcacttgcgggacttcttatttattgaaactttggcatttccggcccttgtaagattccatcgagttggttatgcatgcgctaagtagaagagcagtgcactgcacatatgtatctaaaatttttataaaattggcaagtagttactgaacatatttttttgattgttaaagcatattgacttcagagtgtagtataatgtatgcatttgatatcatttcgctgaagcagatctgattcttgtatatgtaatttggtgtataataactatataactgtggtttgttggttgcccagtatatatatgaaatgtagttagctatatgtttagcgatttagctttgttatcgcttttcgttacatttggaaatgttgtagacgccgttatttcattcacaacttgtatccaattcaagttcaagtctgtgctaaattttcttgtatgcacataactttcttttagtgcattaatactatcccaaaataaatatttgtgatcatcaattttcaatagaaaagcaatttccgttttgagcggccatataaaaggcaaatttctcaaatggtcgttagcagagcgatagcaacttattatgagtgaattatcaacctataaaggtaagagaaattaggactcattgctctgagctaacgaaagcaggatactcgcctaaacacggagacaaggttccagtgctccagaacttgaacgatttaacacctaaagatttttatgataagttcattgctaccaggactcccgtcatcattaaatcctccttaccagagtctgactggaagggttacctatggcagcaacaggattacttgctctctaaaattggtgatatcgtatgcaaggttgagccgatcgatcctgtttctgggacctttggacaaggtatgagtcgaaatgaaatgtccatcaaagaattttttcaaaaactaaaaaatggtgaacgactttatttgactacacagtacgatgaatccaacgaggttttagatggagatgatgaggtttctcttcttgttaaaagtttatgtcctcatcctactgatggtttgcttaccgacttttcaataaccccggcattaatgggcaatttggtcccccagcaatgcaatctttggattggaaaaagtgagaacggcacttcttccggtttacaccatgattttcacgataacatatatgcggtcatttccggatacaagagattcgtaattatttcaccagatcatgcaaatcaacttaaactctctggaaaaatttcaaaaatccaccctaatgggttaatttcttatgaaggtgaagattgccctcagcgcagcgatggactcactgagcttgatgctgcaattgcaaaaacacaatttttagaaaaaaaaattggttctttgaaagaactagcggtccctcaagaaagtatcgaactattggaagctgaatatgaaaatgagatggacagagttcttcaaatgcaaattggcggacctgaagaagattggaatgatttagaagaaggagatgctgctagcttgttagacggatcagttggcggtgatccggaaagtgatattttattgaatgaaggaaatgatattgaagcaactagtttgcaggatacaaaacccgaattacctgatcattttaccaaggtgagtgttaatggattgcataaattcatgggatttgatgatgctaagaatgttgatgttgataaagatgagctttctgctcttgcggggacagttcctctagtggtggatttagaacctggcgacatgctttatttaccagcaagttggtttcatgaagtcacctcttcaagcgctagttctggaggtagcgatgtacatattgcatttaattattggtttcatcctcccgataatcttgaagactttgatcatccctacttggatcgcaacatttggcaagccaagcgtcatcttgttggagaggcaattgatcaattgtatgctactaacaagaaaaacgaaaaacgaccggcagaagacgattcaccttctcaaaagaaaacttgtcaataaaacacttatttataaaacatttagaattgaataattttaaatttattaatacaaacccttgaaaatcccttgtactaatgatataaaaaaaagtcgtaatcgtactccaatgacccaaaaattggaaatttttgtacgtttaagaaagacaattgaaaaatgaaagcataaaaacggggatttataaagataagaaggatttttggatagcatacttaggttcactattctaaaaaaattaattgtaaattattctgagggagtttcgacggctgtatcatgattttcagtggaaagggggacatctctaattataacaagtccggcaaacataaataaagaggcaacaagtgagatatggaaaagatccttctcggtggcagtataagcaacattaatgatattacgaatttgagtcccttgggggtatgacagagcagttcgtaggtcccggaatattgattcaatttctgggacaggaagatgatctttaaggtcatgtaacaaacgacttgagagcctcttactccatacgcctcctgcaatagcagatccaaaggcaccaccaacagaagaaaacgttaaatacaacgtgagattcatacctaatttagcatgtgacgatactgactgaacagcaatttgcgcacttaacgtcagtaacccacctcccataccagcaagtataagcactaaaactaggggacgggtatagtggttatcgttaataccaaataagatgatacccaaaatccccaatacgtacataggaacagaaatcataagcaacatcttgaagcgaccaaaccgcttcatgagaaaacctgacaggatagccgtcgtagtcattgaaaatacaaaaacattaagggtaaggctactcatgtcaattgataatccataagagacttgaaggaaagaagttaaaaaatttgagaaaatataataagacatgaaatatgtgaaaattaaaacgcatgaaccaaggatggtacggtctttcaaagattttaaggcgaaaacgggatagcgtgcatatttgacgtcgtagaagcatagggttactaacaaagcaatggagagagttatagtaaagagagttaaaattgttgagtctggtgaaactacctgactcgaatgggaaaaaggcagcaacaaaagcgtaaagccagacacaaacaacactattccaagaccatccaattcctgccaaaacaaataaaatagtctaagtttttcaggagtggaatgattgatcaagttatgatgttctctatataaacctgcagccttggcttttctttggtttaggaaaagcgaagccaagagaggtaatgaaactgttggtaaaatgaacgcccatataccataacccaatctccacccataatttttctcaggatgaaaggcttgagcaagcactggtccaatccaaacagttgcaagatagggaagttctgggatagcagagagaatcccccgattgagtagcgaagatgtgtctgcaataattaattgagataacagacctagcccagtttggccgcatatatagaggatatatgctacggtaaacatttgaatatttcgagaaaatgccaatgaaagatatcccaacactgtcattcctaatgctaaactaagactctccgaacgtccaaagacatcggcagcctttaccattggtgctcgaacaactgctaaaagaatattgcccaccaaattgattgtagccaagtttgaatgggcggaaaagttgctggttgcgtatctttgcaaagaatacgtagtttgctgctctaatgaagatgcaaatgacaacaaatagagactaaaagagaagacattgtgttagcttgatcataccacaaacacaaacattcaacagatgtatgcaaacactacgtgatttatggattatcatgactacaatactaacatacccaaggtaagcaacaataatcgatcttttagaccatgttgaagcaattgcctcagctttggaaacaccttctagtgacaattctgaagtacgatcatttatgggtccagcattatcaagctcttctctaaggggatgaaattgctgttctaaattttcgttattacgaaaactctttttacgatgctccatgcttccataattctcagtcatccagagtgtatggtaaatggcagtatgcaaaaggtacgccaacacaaattatcagatcgtatagcaaattagagtttatctaaccgagatgtttaatgaagttggtaaacaataataaataaagactgatgaaatgcagactagttagttaataagaggtttttggttgctttaagaagcggttaaacttttttaaataatagaagaattacactttgaccctttctccgaggttcaggctaagccgccaatttgatgttcccgcaattaactcctcgaatttatgagtgatggcttcaatagggtattcatttgttcagagtattcaatttagtttctagtcacacttaaacattttggaagtattaaaaattacagagattggtagcagacgattttacagcatgctcgaaatagaagcattaagaagaaattgcaatatcactcagactaatgaaatccttctaaacacgaaaacataatctaaagaattgctagtaatatcacaaattgctgataattagaaggtgtttacatttatggcaacaaagatgaatgatctagcaaaagagagtttcagaccaaagaaagttgatgcttttcactttatagattactcaagtatctactttaaacggaagtaaacaagttacgaaggtaaaaaatttcaaacatttacaatcttaaattaataaacctatgcttcaaaaaaagacaggagttactcttctaataacacttcttcactaactagttgtactggatgttctgtaacgaaagaatggactgggtttgcagtttggatagtgtatccagctctcataaaatttgtttgctttttgcaagctaaacgtttgacaatggtttttctttttcaacttaaagcactttatgccccatcaattagtccttcttactggaaactatatttttcttgtcagtttggagttcagcaacttgtcaactacccaccactttgggaagtggttaaaaataagcaatgcggaatgactgagactggcagaaccagtaaatatcgtgttgaaattcaacaaatgatgttcattctaggggaggtgcaggatcctctcccagaaaccacacaattagtcgaagagctaatacgtggacaagtgatggagatgttaattcaggcaaatgagctagctttacgacgtggctcaagatctattactgtggaagatttatttttcttaattcgccatgatcgtgcaaaggtgaatcgactaaagacatacctgtcatggaaggaagtgcgcaagaaagcgaaggagcaggatgccaatcctgccgatacaaaagatctttttgaggaagtagattcaaaaacaaggtcaatgaatgcagttgctatgccttgggaagtaaaaaatatgtttacagagcctgtaccggaaacagaagagtttgaagaagataacgatacgatggaaatggcatatgcgacgcgacaacgtcttaaaatggcagatgaacgcacgaagaaaatgacgcgtgaggagtatgttcattggagtgaatgtcgacaagccagttttacttatcgaaaaggcaagcgatttcgtgaatggtgtggcatgtctattctaacagatactcgccctgataatgatattgtagatatacttggcttcttgacctttgagattgtggctaccttaactgaggaagcactggctgtgaaagatcgaatggatcggattcaaaatagctcgggtagtggaggctctcatgcagcgcatcatccgaaaaattgcagtttatttgatggacttactgaggggagaactccccttcaagtttctcatgttttagaagcttttcgtcgtttgcaaatccccgataaaactcatactgctatgcgcagttttcatgggggtttggtcaaatctcgtgtgtatcttatctaatcattttcactgtctcttctttttttttaattgctgtaaggcttccatttacatctaaatgccctgttttcctgtaattacccatactaggtacgtatatgttattatccccattactggttctccttgaaacaatatggtttagatcttacgaaagcccctttactttatggagatattaactactcaatatatttcatcacattagactgttgtcttgcatctccgattgaattcataattttatttctatctttccactaagcgatattcttaattgcagcagtggtagtatttggacttttggattttttaatatcaaatttttcttattatactggaatctcatgatatctgtgaatatttgcaaatcttcttaccaaacttcgtttactctatacaaactgctgattttcgtaatgaacaaggggatcatccttttgatatcgtcagtgcgaaatttttaaaaaacaaagggtttctttacgttttttttttgttttcgagaacatttgaacttcatcactgagcgtcattttgatcataccttccaccttaacatcatacatacgccaactccaagaataaccgaacattcgtattccgaagcactcacagtacttaagagatacaaaattcaggaattttaaagactttttgatttattataattgtaattctttataattttttgctatccgaagaattcgctcaacaagattacaacatgacatctggatctcccaaaattacaaatttgctgactcgtgtgaagcgcatcattccaccacttcttgataccttccacaaaggtcaagccggtcgagttggtgtttttgggggttgtcagcactacacaggtgctccgtactattcttcgatgtcgtcgatgctcttcggcagtgaccaaagccacatattttgtgaaaaagaagctgcaaatgtcattaaaagctattctcctgatctgattgttcatccatttttacgtgaaaaggacaaagctggaccagaagatagtgtcgataaatgctttgaacttataaagcccatgatgggaagattgcatgccatcgtaattgggcctggattgggacgtgatgaatggatgcaagagattatggccaaagtaattgagtatgcgcgcaaaaatgatatgcctatggttatcgatgctgatggcttgtggttaattcaacaacgtcccgaattggtttcgggttatcataatgtaattttaacacctaacgttattgagttcaaaagactttgcgacaagcttgacattaagagtgacggacccgatgcttgcaatcagctagctggcaaactaaatttgctcatcattcaaaaaggccaatccgatattatttccgatggcgctactgcatatgcttgctccgttcctggtggtcttaaacgttgtggtggtcagggtgacattttaactggtatacttgctacattccttgcttggagacatgcttatcttagcaaagaatgggatacagaaggtaatatggatgctaaagaatgtctcttccttgccgcatttggagcctctgcctgtactcgctggtgcagtcgtttggcgtttaaggaatgtggtcgtgcaactcaatcaactgacctggtcagacatgtgggtaaagcgtataatgcgttaatggaggatgagataccgtctgtcgaggaaaaaataaaagattaaaaaaaaataatatttaaaaaccaagaagataaaggacccttaaactaataattgacttttttgcttgtttgttccctggaattgacattattaccatgttttcaagtcttggttcaaattcccaagcaaagggataccttaaacttagttactaggaatgactgaaacgaaaataccagattattaatgaaatagcgtatttaattttaaaaaccatgttcaaaataaacattgcatagtcgttggtatcattgttgttgaggaaatttgatgtagctgtcaccgtttttatttattgtaacagacaagggcaagcagactcttctttttgattcgtaattgtcattatttacattatcaaatttaacggaaattagtattgttcctaagttttactataagacgatgtatctatgagcacgacaatagcttcggaaaccaattcaaaccttcatataatagttaaattctaatattctacgatttagatatctagattattaatcaattcctatcttgacctcaacgttgtattttcattctactgtttttcttcttggaaagtcataattgacaatatggaatattgaaatgcgttatcaattaaaaatgttactatttaatttgaaaaaaagaaatgtgagataaaaagaaagaacatggataataaatatctcttttatgggataaagatgcacagatacgattatttcgaaaacacggtgatcacggcaaagaccccgtaaaatagagcaattggataagcaaccaagaatcgcatattgttgacttgtaagataccaacaaacatagcgctagcagcgtaagtacaccaaatacatgccaaagccgctaatgcgtatcctgcaataccactaaaaagatacagttagtattaaaaattcctaaagcatgaaattgtgtaacgattatctaaaatcattttaccatatatcagagatcgatcgactgacgtacttgaatgtgaatatatttttaaaaaaggcaatcaccacaagagggagtaaactgtatcctagaacgctgacggttcgagtgaaaaataaatttttagcggacattaaacgtaaaacaaaatgaaggctaagagagcccaaaagggcaataccataaatgtaaccgaagtgagaacgaccgtgcaatgataaaaatgtgctgaataataaacaaaatagaataggccctgccatatctgtatcatccatgatatgaacatcgacatgcttaaatgggtttaaaacatgagttgtctaatgaagaagttagcttaacgcgattcatttaaatgattttctaatcagcatctaaaatatgaaagttgaacaaaaaaagagaatcaatagaaagtttgtttctacattaattgaaagaaatattattttagtaaaaaaaatatttacaatcttcgatcactttcgaatttaacatttcactacgaaatcactctttcccgttcaaccattcaactcttcaagtttttccatcgtttgcgacgtaccttttgctttatatgaccaaaatttatttctaactcctccaacaaagatggctcaccagggtagccactcgtggaaaaagcagcaagccatccttgggacaatggttcgtgtaatggctcgtcataaaaaccagcagcacgagattgtgtgttgaaagaattgtcagctgtataggaataatcgtagtattgtagattagctgggttgttgtagtaagccatcgaatttaatttttggtgagaaacctgctcttgctaagttaggagagagtaggagggaaaggtgggtaaaatggaagctcctccttttccccttcaactttgattaacaagctttaaaatagtaatcttctcttttttttttaagaaaaaagccccagtgtgaacagcagcgagaatttaagacggtaagggattgggatatttgaaggtatcgttagtcccaatgaacttcatgatattataagatgttctgttaaactgatgttgaaaattattatcagttctgttattttgctcattaattgaaatgtactttcggatatcatctttgcatgatatcaaagttacagtcttttcttaagctctttgatattttcatggccagttctattgacataacaatgaagatgaaacatataaaatttatatgaactattattacaaatgtagatttctgacccttgctccaaggaaaattgtgcatatacagaggaaattaaatgtaaacattgctataatacagtataacagatattttacgagcgaccaaaattcgtaaggcataatccagcggctttttaaaaattcgtggattcagctgaactgtactatgtaaatgacaatattattgctgttaaaatatttgagctcatactttatacctgtttaaataatacatgaaccgctcaaaactaactttgggatattaagaggttccaatttatttgatttattttttaattgttaacaattgatttttctactccttagtatatacctcagatggttagtatatgagtcacttgagctatcgcaaataattcaatacgactaaacaggtattcatttattgtatacattaagaattacttgaattacaatactaagcttatttttagttattctgacagtaaaggaaattttgaagttattggttttatttaatttgaaattttttattaacttacgttactgtggcacacaaaggtttcatgaaaaagagtatttttgtgtacctaacacaaattgattatcagagttatttttttattgttctcctatttcattatttaaacacatttatgtaattatttacaattaatggcagcaaaaatttgcatttcataaatttactgatataaaaaatccaaaaaaaaaaaatacttctatttatctaaggatcacaagaagctacaaatagagtaaaaaaaaacttcaagaaaacaacagaagacgattatcgctattacccacgactatttatatcctaattgtaaattatattttctttataatattccatccatctcgctaaaaataagcttaattttaacggccaacaatatatacaaaaacttagtgtctagtttcactataataaagaacttactttttgctctagaagaaaagaaaaaagaaaaatgaaatgatatgaagatctttcactcataaattaactgcggtgtgacaaaattagccgtgactggctcaatgagagaaatttgttccttccaaaaattataataaaaaagtcccatatgttgtaaaagttaaacgaaaaataaatcgtttcgaagcaagtctttgtttcctttgtcagtagtaagctgtagggatttcaggagtttacacggaactattatttctcagtttttgtcaagcaattgaattctacagtaatctttgtctttcacttaataagatatatgtaaaacttaaatttgtctatgtctggtgcatagtttagatattttcttaaatcatatttttgtagcagttctgtcaactcttcatctaccaccacgtacatatatgtatattttcattagtagccaatttttttcgacaatataggttctaagaagcatataatttaaaattttgatttttttcaatccagctcctcgagaagctcatatttattcatagtttgacggctttcttggtcagtcgtatcaaagcaagcgcaaagattcccacatttttgtacttacaataggcttgtcaacgtttactggaggagatttgttaaagttaatcaattcgattagattattgtttggattcaggtattgatcgactcatatttatctctacataatattatatccacggttttacttttttaaagtcaaaggcagtcccatttaagccaaaagattcgttcgtttctcaaaatttaaaaagaaaatatacttaattgagcacttctggtaaatcgttacaatatgcgaataaactttgttttgctcatcactcttattttaccatggtttgtgtccggagattcttctgaagaagccgtggacgcgcctttggatgtgaaggatgacaccggcaataaggattactataaagattctactggtgcctaccactttgataaattaattgtgaccccgttggagtacagagatggagaaagctggaaacaatctgtcatttactgcgacctcatatttgcgaaagaaaacaaagaagaaaaaggttcttttgtcaaagcgcaactgaaagaggatgccgaacatccttttatttacagactgcttaaactccaaacaccgttagaaacttatcgtggatttatcgatggaaaaaatacagagattcttgatgagattaaatcaataaacttattcgaggattttctcagtgagtctctagtccccgaaatctctccatcagttaatatacccattgatgaaactgcattgtattgttttatcggaattcaagaaactgagccaattcgtattccttggcctgttttgacagtcgaattttatggggatgcacctcctccggagtcttattttcgtaccataaaatccaccttattagcgatatcgatgtttttaggattcattacactaacatggttgttgcgttgtattaaaagtcagtccggggttcaacctgctcaaatttcccttgcattttgggtttttatctttgtgtttacccattcatatcaggtgtactcaatggttgccatcggaaggggttccttttcaacatggtacgtagtttcctttttattctcactcgtctttgaagaaggattggaacaatctgcatatacatcatttttattggtattgtgttttggcttgggaatcacgaagcctgctttagtgaagtactatgtttacctagcctttgtagccttcgttcaaggtttgtttgtcacgtttgcacccctctcctatcccgtgatgtccttttatggggttcgaggaatcctcctcaagctaatttggaatatctatacttttgtttactatggattgccattctttgcagtttaccgactgtacaagcaggctggtgaatcaaggaaacttggatttgaggccaagtactctcttttgaggacttgctatattgcattagctgctgtgaccgtaagtaattgcctatttttgggagttgttcgtcccttacttggcagtcaactttcacttggcttccaactgataacttcctgcatcacgtttgttgacttcttggtttttgcttttctctttgattgctcaaaatttgtcttcctaaaatatcagccgatcccctttgaatggtatgcactggaatcgatggaatcccttaaccttgaaccagcgcccgatcgtaaagtgtaaaaaagctttttgataatcagttttatattaggtcgagaaaacggtagctgtgtgcgaaaatttaatccttgaaaaatggttacttaatattttttattttacttttgtggtgacagttcttacattttcttgattttcttaattgcacattcccatgagacgccatttcttgattttaatacttgtctttttaaattgcttttttcaattactatatctttatccagattttttacactatatactctttcatgctattataactttacaaatacttccatcctttatattttttgctaacacaatcccattttctatacatataaatacgattcagctatattgaattcgtacaactacctccttgatgatttttgctacattttttctactttatgccttttttgatgatgattttgaatatattgacactttgctaaataattaaacaagcttctcttgatatcctgcatccatttcaaatagtatcacttgaaatgttacataattttaaccatgagcatcagcaagaagcgacaatgtttctaatgcacataccatttatcgatttagtaatgagaaaagttaagtttgttaaatagcgatagaacactaaacgacagtaaagataattgcatgcactctgtgttattatggaataccctatatatcagtataccaatcacgcaatcgggttgaactgttgaatagtttctggcatgtatttgtttctctctaccttttaccaaaacggaagttggaatggaagttcgtatgtatgtctgaaaacgtagctgtttcattccgtttaaactaagacttccttaagccaaataagcagtaaatgctcaaacatatgaaatattctttaaacccctaaaaaaagaagatctaatacgtaaaccttgtgttctcttactacattcagacacgcatttttaaatttgatgaaattaatgtgtttgtgagcaaactatagtcatgtgaatgtacggagatgatatggcacgatgattgtggacgtaggtatccaatattgtgtgggaagtaaattcaaaaaggggcgtctaggggaatgattaaacgtttaaaccacgtacaggaaatcggaacactgtataggatgttaactgttttgagtatcactagttctgaaacttgcaaggagaatatgtttattagatgatacagatgtcgttcaagatgttaaagctttaaatctttgcttatgattagctctatgtcacccctgtattttgcttgtggttcgtatgattctgtacagctcatcgatgaagggtagtggagtcttgtagatattgggtactactgacgatagtatcccgaagcagttttgacctttcgacggcaattgtagtttgcatcaatagcgattcgagtggatggatcgcctattattgtgagttgtttattagatgatgtacagttcgcattaaagataggcggtatgtgtcgtgaaatgtgcggaagtttgtggaatttcatgtttaaaggggttctcaagggttagtcgagaagtcgtatttcttgctaatatttcatcaaacgggctagatgtgacaactgttcgttatcgtatgtttgtctttctcactatattgatgtgttatcaaacttactggtaacttagttgttggcgttacctaaacatattgccatattgcagtagacgtttgtgttattagctgaatttttcaaatgtttacatcgtttactcgttcagtacccagtggttagctataaaagttattttgctagcctcatctgactaaacagaggaaaaacgctatattacatttgtctatcgattcgtatacgtttccatcagtaaaatcgagcatataatcggcagcataaaaatcgcaaaaggggtcagggatattggtcgttctcgctcgtctaatgttatctgtttattgtagcgattatcaaacattttttacaattaggaagcttcaaaaagtacataaatgaccatctactgcctgataatcattgttagtttgtttgccaatttctaggtcttaatactcgtcctaaaaatttaattttgcaacatctgtttttgtacaccttttattgaattttggtatcactgtttcttattaagaagaaaagatttgttcttcgcttcatatctgtatctactatactctcatattgcctattttatcttcctaaattttatcttccatgaccatcactatgcccagcgattgtaaatattctgtcgataccgaattggtacatgttgaaggcaatgaagaccagtatcatgcgtcttcagtcccaatttatcaatcagctacctttaaacagccatgcttagagcatatgggcaaatttgattacactcgttccggtaatcctactcgctctgttcttcaagtgcacttggctaaacttatgaaggcgaaacatgcttttgtaactagcaatggtatgtccgctttagacatgattttacgctgctgcaagtctaatagccatgtcgttgctggccacgatctatatggtggctctgatcgcttactctcttttaaccaaaggcaatatggatttaaagtggataacgttgatacttctgacttggcagcctttgaggcagctttgcgcccagacacaaacttggttttgattgaaagtcctactaatccccgtatcagcatttgtgatattcgggctattgttaaaataactcgttcaaaagccaaggatgccttattggtaatggacaatactatgctttctcctgtcctttgtaaccctttggactttggttatgatatagtttacgagtcggccacaaagtatctctcaggtcatcacgatttaatgggtggtgtcattgccacaaaaagcgatgagattgctaaatctgtgttttttaacatcaacgcaatgggtgctgctatggctcccttcgaatgtttccttctgttgcgcggtattaaaacgatgggattgcgtgttgaacgtgcacagcagaatgcaatagaaattgccaaattcttaaagagcaagggacttcaggtcaacttccctggattagaccctgacgctaagtcaaccgcaatcttttactcctttgcacgtggaccaggtgctgtaatgtctgtttttactggcgacgttgaagtctctaaaactattgtaaacactactaagctctttgaaatatcggtttcgtttggtgctgttaactctttgatcagtatgcccgcttatatgagtcatgcttctatcaagaaggaggttcgagacgctcggggattgagtgaagatttgattcgcatctgtgtcggcatcgaaaacgtcgatgatctcaaggctgacctcgaaaatgcccttgctcaagcaaattttaaacagaattgatttcgtctatgaaggcatagtggtattcacaactaagctggagaaagggttgcttaagttactagttgtggtgcatatagaattttaaatcatcaaatattaaaatgatcgaagttttgcttaaaaacatcgcttcatccctacttacatatgtgtaaattttaatggaaaatattattgagatattgaccgtatataaattataattagtaattggcattagcctacgcttcctaagatgaagcaaaagcattttgagtaacattagtcctcgaattactagggatgatccaagtctacaaagaaaccaatccaaacgtttgaaatgtactttgaaatagaagataaattaatgtgttaatgaatgtcataaaaaacgtgagaaaccctgtttgaaacgcctatttcaggtacttactggcatagtacggaaaaccaatagagaaggaaatacacacaacagcggagataattcgagaaataggatgttttttgtatttaagttctctggttggtggaagaaaactctttagatttgaaataccaaaacctttaccgtcatcctgcatgtcattttgtgcctgaaatacgaaactatttctttttattgatggtttggtagtgttttcaccgggcaacatccaatttattttttcactgtgcaattcaatgtcacgaacgtttccaaagaagtccgttattaaaatgtcatccgggcttcttcgtaagttgatgggttggacaccaggtgtagaatgaatttcatacggattataggagttgatcaaatcctgcatagtcaatttgcttttactatcaaccctattttctaagaattccaaattagaaaaggtgaagcgatcgatcactgcaactccaatatcgatatcagcatgatgggaataagaagaagttcccacttcactgctaccaattgccaagacgtttggcgaatagatttttgtatacaaagaatttgcctggcatgtatctaccataaataggatttcattgtatctcttgtgttgatgtatttgctcaattgcatcagcaaggtcctcagaactcaattcttcagcatcttgaaatttaataaaaccatcgcctccatgacctgtcatataaattaggatattagatctttcgtttgtcaataatcgtttgctggctggtgtattttcagggactctctctgtcaacaatctgataaacgcttcaacagtaacttcatagcccttataatcaatttcaatttcttctccatacaaatctaatgctctatctgcattatcaaaaactgttcctggaaacaaatttcgagagttgcaagcgtagtcgtcagctatcatcaatataatttgactgtctgggattccaagacgcttgactgatctgtatattcctaaaacattcgcagtatgtctgtagttgaaccaaaaacgcgaggtagaaattaagacggcccaattatttgtatgcgaactttctgcagctattatttgcagcaaattgagcagcaaaagtgccacaaactgaacaatcattaagaatgctactcttcagttgttgaaattaaataaacataaagccgtttagtagtatcacgtttatacaactttgtgacaaagcgtaatgtttgagcacgatattagcatgtaaagtttttacacgttaattcagtaaacgattcctgcaaataattcaaaaaaaaattatcaagcccttttattggtatatgcagatgtaaagttcgactttgttgtgcttactcgcttacctactatggtgctcccttgctaacctgcacttgcttgcgactagaactgtattttatcgaagtaatagtgctcactataaaacatcaagaaatttattctataagaaaacacctattatttaaggaactgaaaccaaataaaacccctaaaccatcgattactcccgaaaaatatcaaacgtgtaagcatatgatctgagatacgcctttaagcaatttcgtttactgatagtaattaaaaaagatgaaagaaatgattaatctagacagctcctctgaacccagcatcgttacaaaacaattctctgtagaagaatgcttgagtaaacttaaagagcaacattgctatgtaccgatgagaacaattggtcgactaagactcaggaaatcttccgatcaaactgaaaaaaaatgttggaaagagaaactaatgaaaattcgcagcgaacttgaagaattatgggagcagtcgatgatgtacgaagaacagaaggaacttactcaattaggggaaatgttggatagattgtgggataaacacataaacagtgaagggtcaaagtcagaaactatcagtgacactgccattagtggtaatgatgatactatggaaaagagacttgaacaattttcagatgacactttgcaagataccctggaaacggaaaaaaatcttaacagtaaaacttctgagtccttgaagtcaccaactctctcatatccgttcgatttggatagccttgacaaacggatattcaaactagaatcaaaaatagggtatgctgatgaaccgcttagcgagcttttaaacaaatgtatggaaaaacttgaaattgttgagcaggatcctcaattttggcaatcccgaattgaatcatggaagcaattacttgctaaagattttttgaaacaccatgaaagaaatctttgttcaatagagaaacaaacgactttaaaaaactcttcgttaaaggaattgtgtacggaagaagatattgttatcatgttagagatttgttcttcccaacttcccttcgttgaacagtatatgcccatattaccattgttgttagaacggctaaagtctttacagaatatgcacaccgatgcggctgaagcaattagcagttggcagggttcaaaagatgtaatgatgactatgcagtctgagttgaacgaatggaaaaatacagttgaacgccttgatcattcaaaattttacacacaaagcgtagaagagatgaggagattatctgacactgtcacacagcttgaaaaacgcgttttaaaattgcaataggatagtgctattgaatttttacgctgcatttctttgttctgaagtttttggacgtaagtcttgaacgttaaggaatgagagtaaacaaaaatttcctaatttcctatatcaaagaaaaatttatttgcgatagtatcagaagcttcgtacaatttctgtttttgttactatatgcgtttcatcgagtatgcaaataattacatttatttcaggaatattgaaacctaattacttcacaaaaagcaatatacttttcactaacctttgcttcttgttcaaatacagaattgtcatagatttatttgaagtagctagttgcgttctaccgaccaccagaaattaccattcggttcgctttcatgtagcaggatgcgaattttgggttccttaccaaataatataagaaaatgtacatttaagttaattctacaaaaacgatattcccataccgacatacttaaggaactactgtacgatataagtgattcacagaaatttataccttcggcatctcccatcgcgtctaacttattacgggtatcttcttatggaaaattatcctccttgtttattgaatattctaaagcacgttcaaaaaaagagtttgaccaactcagaacttcggattttcaatcaatattacggtccgttgtttgtcccaaaaatggaaaaaacatccgacatcgtgatcgtgatttagtttctttacaaattaagctaatccttcaagatgctgatcgtttgggaattcaatttaacattgttgactatacccatattttacgggttgcaatgtatactgggaacaagcatatacttgaatatatagtagcaagagtaaaggagaaaagaatccgcccaagtgtcgattactttaatgcaattctcggtgtaattgggggaaacagatggtcgctttctaaattccagagtcctgcttttagaggatcaccggtaacggaacctgtctctggtaaaatgcttgatatgattgaagtcgattttccaaattacgatttggtacctaattctactacatatgattatctgatggtgggtttatctcgagatggaaagattcgagagatttacgatcttatagataccgtttgggggataaacgaaaattcatctagtaaaaaagttgactgtggaaacgttacatttcctacacatcatacagtattttcaatcatttctgcattaggatatttaggtgatgtctcaagtgcagtatctctgtcaaggaagcttacttctgtttataaaattaattttcctgagttagcctggcgctacataatatattggtccattgcatctttacaatttagagctccagctggtcatgcacgaataaaaaatattgagcttttcattcgtttgtactctcaaatgtataggcattgtgttccaataattgagatatacgatacatcaattaaattttatatgaagcatgggcgattcgggttgctagaaaaagtctgtgagagttggactaaacaatttctaggatcattggaaaagcaaaacaacgaagtcaagaaaaaacatttacaacttctcgaaaagcaaatatcgaaattgatgagatatgcagaaactgaacgacctcatgatactaaacgagtttcggttaagtggtcaaacgtgttgaaccaaattcattcatccgtaggagatcctgctaaaccttgatgatctatccattcacactgtacattccttattaaaaatttatcccttcttttttcttatatttatttctctgcttctggaatttgagcaaatccgtaaataacggtgtctaatgtcatttagtaagtctaaaagtgtctaggcatgcattttctttaaaggttttagaggactatcgaaaattggttctaatcgcaagttagggaatgttgatgttaaaagttctggttttttgttatgacgaataatatgttatcctttgacaaatattatatcgatattaattaatgtgccctttttagtaatcaaagaactccagaattgttgtacttgttaagttacttaaaaaaaatttaagtaaaatttttttgctagcatcttaaaaaactaaagattcaatgtcttgttgtgcatcacaatttctgagtacataactactgatgcttgagggctctaattttcaagctaaatcaataaatttgtaaagactattaaggtcgtcatgattttttaagactcttaacactatttaattgcctaccgacgcattaaaatgctctttcgtgaactaacaaagacttgggtcttttttgttcaaataagctacacttcaaatgctagttttttaagaaaatttatggagattctactttcaaaattatttatcttgcagatttagaatgttcgaattaggcagattagttatattcaatgcataggatgaatcataaaagttgcttcactttgatattatttaatatagcttcatttgtttgagttcgatatattaagatacagattgctcttttttatcatattaacaaaggttgaaaagaggtcttgattgtaatggtttaaaatttaaaataactaacatatgtaattttccatacatcaaacatgttttaccttaggggttgctatatttagtttacccaattcaactatatgctttatctcaaatttaataaaatcgatgatgattattatgctaactgccacaagcggttagaagagatatgactcaaatatcgcaagtgtaaaatggacatttaggagtttttgctgacttgataaaaatattcatacgagtaaacaaaggactggcacgcctacataatgttgagacgagtgattaatatggtttggttaattaggtgtattatgaatgaaagaagtactgaaagtgaaatagagaagcaactgaaattcacagctttctctttaagaacgaacgaaaaaatgacaaaaaagctaaaagaaacatataagtgcagcagaaagctgtccatccctaaaattacgggtaaagaatattaaggaaaaggggatctaggcgttctctctcgactagcagtaaacgaaagtctgtctgcgagaacatggcttgaagtggtacgtatcgggggtccatgccacttagagggactgctcatttctaaatcatcagaaaaatctgctatatcctcataacttccatttgcagacataatgtacggagccttgcgacgttgcaagcgcagaaggaattttttgaaacgttggcgccttttcggatcatacccgaacaaaaccaaagagaacagaaagaataagcagaaaataaatgaaagaataaagaacaatttattaggaaataacctcatccaatgttttgaaggggatgcgattagctttccgtatgggtccatataataattagcatattccggttttgctagaagttgctgatttgatgcataaagcaatacttggcctaaggtccagctcacttcggtgcgttctattttttctaaactcgtgaatggagaatggtacgcaggaattaccgagagcccatcctttgcatcattactacttgtatttgacttgggaacgtcgaatccttcatgaaggacattcaacgcccatgatgctttaaaacaaagcttttcaagcttgttttcatcagtacttggagtcagctctttattataaagacgggaaagcatggtttcccactctgtaccacaatactcgtcaacttttttgtaaaaattagggaaatgatagctaccgcccatatcaaacacatcattagtcgtataccaaaattccgagaccccaacaaattcagtatttgcaaaatcaacaggaggaatagatattccatcaaagttacaagggtccatggagcatggcttgtctttatttaatagattgtaagtcagtttcaagcattgtttcaaatctccagtaccggcaaattcgatcccatcgatatcataagttcgtccacgcaaggaacacggatcgcttaaagtgttgccaacttttccgttttcgctttctattaacagtcccaaatacctgcggtaagcttcattagcgccaaaaccgagccaggtagtaacaaacaaaggatattccaattgctgaccattttgtagtcctatgtgaacggtcgaaatactatccttgtaatttttgagctgagatgggggaagttcaaaagcaatttgcacactcgcaccgcccatatctaaaaaaccaaccgttgacgtatctttttcttcaagtgtcttaaggagatagttcgtagctagccaaccatacataccttcagctttgccatcaattacacggattgaatttgagcaattaggtatgtcgaaatcgtaattctttttaatatatctacaagcatgcgaaagtattttgttttgggcatcaacgcccagtaaacgcataccagctgtagcacttaggaaaaccggagtttctttatgtacatctttgggaatagcatgagcagcaaaatccaggagttctttcaaatgcttcttccctacatgcttagggttattggcaaaggaagaaattccaggttgaacctttaaagaccatttaccaccatccccaatccctgtctcgattaatggtaatttttttactttatcacttaaagaggaatcggtatcatagtcccaagaataaattagaagtcttgaaccactagatccagcgtcgatgaaaattccatactttcgaaccatttttagccacctgcacttatttttcttaacaaaatgtctctttgtctataagactggatattaaataacttcgactctgaagatggatattttcatcaaaccagcccaatttgccttttgtttgttgatggttgaaagcgcactatggcgatgtgaacaatttcaatatggcatatgttcccaagatatacatcaataaaattcagttaaatatatgtatctgtcttatcaatgaacctctatttaacttaattgaaacattgaatgaacgtttgtagtggattatgaacattcaactcaatgtttaacaactagcgaatgtataggtagcacatttttaggtggtaaatcactatatagtgaactctgtcaaaatgcaaaaaaagtaaattgagacgaatttaaggacccattcatacggactattggaataatcacattaattttggtcacttgacttaaaagataatgcgactagaattaaagagaaaaatcgaatacgcgaaaactttttgatttgtctctttaatttgcttagatgtcaaatactgttagtaccaacagattgacaatgttttgataacaatcatcaacaatttacttcagaactgttttaatagagaaaataattgtatccttcaaatttcaacggtttaacactgtttaagatttaaaatgtcatttacttacaagtatttcatgcactttgctttaagatcacagtaacggttcttcgtagagatatttgacggctttcagttcgcattctatattaacttgtgttttaaagttttgattgagagaacgtttatcccatttgacgaacatttagataattgatcagttatctagacgggagaaatgaaaaatatttaaactcgtatgaacaataaataacacaaatgcaatgcatccaaaaaaaattataaaatccatttacaaaccataaccatatcacataacacgaaaacgagtagaattttaatccaattcaatactcagaaacttagaggttttttaattgtctaaaaatccaaagatttaacaggctgtttttgaggattcgtgtttgaaatcttcgtatccttttgctcatcatccagtggaggaaggacccatggttcaatggtaaatcttcttttcgatacagtaaatgagaggtctccagcttcattagagtttgcatgattggtaaatggaagtgctaagggaagcttatggatacggaaaagtcctaatggttgtgtaactaaaccgttaacagtttctttgaccgggaaaggatgcaaagagaatacggcggatgcaaggttttctagccaaaaaatttgctcgcaatctcttgaaaacaaagtagaaggaactgaacacatacatatcaagtgcaccgaagtagtgcatttgatgagcgatgaaagtgtgtgaataaatcttatgaaatgctgcggatgagtagcacggatagaatagaaggctggggacaaaatggatggaagaactaacctgcataccgtacctggagtcagagtagataagaatctcgttagactttcaatgacaggggcgtaaggattagaccctgtttccaaagggaatggagaaacagcgtatttcatatcgcttttcactatcaaattctttgacaaatcaaaggagtgagtatagccaggaggaatcatatcaagggtcggtgccttggttttggagacttgttcatacctccaggcaattttcattctttcttgctggggatttttagagggaggagaagaatgattatcctctccagctgaattttcgtttttattaggccggtcgctgtcgcctggaagttgacgaaaccacatctctccaatagatggaccaagccaaataacatggtcctgtttaaggccttccgctgcaaaaaatttaagtagcacagaagcataatccatcgaatcttcctctataaccagcaaacttttcattggaatgccgccagacaaatagtagtcaaaagaagaactcccagagcttgtaatccatctagcatcctttgaagatagtctaacgcctgtcggcaagtttgttggtgctatttgaggtgctgctttccttttgaacgacatcaatacttatttcgattggtgtacgtggaatagcaaattggatggaaaggttaacgcgacgcaaatttgcagcacacatttaagcatcatcagtcagaaaacaaagaaattcagcgttgcgattgagaaaataaaaaattgttgactaaagttaatcattcaataaaaataccttttagataaattttgttgaactaataataaaatttcactagtgggcgcattgaaacaaaaataatattgtaatactacaaaataacatagaaaatgttacgtcgtacagtcaattagcatgatcggaaaatgtattactgttgtatttttgaagattactttcaatccgaatctagttggacaagacttatgagaaatttaagtcaactcaaagtacaatctattcatattttatttttaagatcaggagaatctgattgctaaagatacaatttaattagctcttcgcttaccccactcttcgaatcaatgatccctaaatcggtaatgagacctgagacaaattcgggtggtgtaacatccaaagtaggattatttcgaatttgttcttcattcatgatcagctcgttatgaatagcatctgatggagttggaattggttcaggttcaggatgaacagtttcaggagatggatcatcaaattccagaataggacgactaaagggaatatcatattgagaaaggggaaacatacgcacgaatttatgactaaaaaacgttagtacaaattttaaaattaacagggaaatggagagatcatagggaaaaataattgtaagctgaatggattcaacgtttacgtacctttctgcaactgcgtaaaagggcttatgtgcatgtttggcaaaaacggcaagttggaaagtaccgatttgattaatgagtcctccgttttcgacaacaccttctgcgccaaccaagaccaaatctacacggttcatagtaaagcttacagcggaatccaaaaccatgcaagtaggaatacaagcattttttaatgttctcgtcattagacagcctgagccgctaggtcttgattctgtgacaaaaactttgaaacgaacgtgacgcttggcagcagccaaaagaacagccgcaacaccgcgtgaaaacccatgggtaagaataacactaccatctcgaataagagggtaacctaaatgtgcaattctttgtcgacaagcacgagcacgctgaataaagagttttccattttctaccaagtgacgtttgcattgctcaaaatcctaaagccgtggagaattagtaaagaaaagaaaactactttgcatcaacacataccccgacatcgtgtagtgatcgagtgacaaaccgttggaaaatgtcacaaccagctgaaagcgaaatgttgttttgaacgccttccttcagcgtatttgagccattttgtaaaatgtccataaattctgaaattgtcttggctaatagaaaaacatcagtaaattcatttctcacatgagtactacaaattaacataccttgagagcgcgacaaaagctggactaaagcctcaatggcggctacaggcatcgtgatttctggatcatcttgcaaaaattttttgtaaacctggacgatgtcaaattctccttgagaatgtcgaacgattcccgaagaatccgattccaccatattcgcagatgctagacgctcttgcttagtagcaacatcttttccatactttaaggatatccaacaaaatcaaataacgggcaatgcctttttgtattaaattgtaagctacgcaatttggtatctgatttaaggatacgtagaactgcggtgagttttccttgtgatctattatattacaatacacaggttgtataagtagcaactgagtataggtattgtattaactgagttataatgttacctatcactaatatagctcataactgaactgaggaacgaggttcagcagtagctctatttatattattcagataatatagatcttaatagattatcattaagatcaatctcaatatcgtatcatacatggtacgatatataattagaacatgtgacatatagtgatacgcaacgtagatgatgcgatgtcgagattgatattgataatactatattaacagatagattatttggatagaatcgatagagatacaactaaacctcatttcgcagttcagttataagtgataggtgacattataacctaaatagtacaataccagtacttagtcattacttatataacccggctattataatataatggatcatatgcaaaattcaccagtttttcgtatcgttaaagcagataccaaactgcgtagctgacattatacggcgttttggatactgatctacagatatgttcctatagatatttatgtaggtgatttgaatggtatttacatataaattggtttattaaatagcttatatttaattaaagctaaatattgagaataattttaatatcatattcttgactgagtacatctgaggataatcatgaaattcttcctcggtgatcagtaaacaatgcttgactgttgatttccaatatgtaacgttcaacgatacttatcattgtatagatagtgaatttgtagtataatttactatgttcctaatagttgagcgtatcatgaacgaaatatgtcaaaacgcttccattttaaaaaaaaaggagtactgatgaaagcagtaattggatttggtaaaaagtaatatagaaagttttttaaaaaactattttatgtttaagagacctttcaaaagttcatgaccatttctacgagaaactaatctttagtccaaccttcgtaaatctcgcttatattaagcttgattttacttcggtatttatggatgacgcgaacactaaactggtatagaaaaaacgctattactttcagcatctaaagaaaatcatttatgataatttctatgctttcaattatatctaaatatttacatgctcaatcattcaaagcgatgctacaaaaatattatgttttagttgtcgactcgaatttcagtaaaatcctaactttattgctagacatccgtaggttttcatttatgctataaatctgtgaatcacctcgtgatcggcaagttgttaaaataatcttttaagtaactctaataccatgcactatagtaaagaaggtatatatttctttgcgtgcctagttcttgttttcaatagcaatagtcgttatctcccatagcttttaattctgctcatcgatgagagtaacatattccaatatcttctctacattatcaaatcgttttgcaattataaaaatatcaatagctttcgatttcccccaatatggctaatgctaaaatttataacattgatgtagaatttggcttagttaagatgcaagttgaaaatgtcttatgttttatgattatcagaaaatgttttgtgtagtatctgatattaaaaaatgcatatcaacttttacaataaattcgcttgcgcaaaatgtatagagactgcatatctcgtttcttctccctgcggagtgcctgtaactggcgtcttgcactttcattcaaaatcgaaattttttggtaaggatttgatagagattgtcacttggtagcatattttttctatcttgaattcctttttctaggcttttgtggctcttggccgtccactctttatttttgtattcaactgttttttaatcacataagtctagtcataatcttttgaaccaactcaaagcttcttttttttatttttttctttgttaaaaaaagtctttattccttttattatatcagtttatggatttcatcgtgtatggctttatgtgttcattccttctgggcaacggcggtagacacagcgacttcatgtcattttatatcatctgaaaactgcttagttttattacaagccttaaaaattaatatttatctctgtagtgaggttcatggcttacaattctttacctctatccctttattttctacggtgaaacatatacgcccatatcgccctccaggattagatagagactatttatttgtagttctcaatgatgatacttatttttcgatttattgggacgaggattatcaaaaagtgatcgtcgaccatcctccagttcgctatcgagttacatttccttggaatcgcaacgcgaaaagctactgccttgtcgacttaaggatgcgtgctatttttttaagcattgacgaaatttccatgatatgtattagaatcctttctgccgaagaacggttgaaaactggccgttctatagatagcggatttcctttttcttttccagtgcatctcatatatgatatgtgcattctcaatgattccagtaccccaactcttgtggtccttcacagcgatggcttagattgttatgtaacagcttttcttttagatttaagctcaaaaagtttgggaaaggggattagactatttgagcgggttaaaccgtcaatgatcatgccctttggaaaaagaggtttgctggtttttgagagtttgtttattcattgcatgtatcgcggtaattttgttacaatcaatggtccttgtactacttatatgcattggactcctttgaaagggcaaaagatgcattatattgtttgtgatactaatggatatcttttcggagtatattcgagtatcttgggaaaaaacaaatggagcttggttatggaaagactaccaatcccacctttcgactttattacttctctaaattccatccatgagggactcttgtttatcggaagcaaaaattcggaatctaaacttattaacctgtctactttgaaggatgttgactcaatacccaacttaggacccattcatgatttactagtactcaaaaacgacattgaaaaaagtttccttgtatgcgcaggaacaccaagaaacgcttctttaatttattttcaacatgctctgaaattagatattttagggcagacgaaaatctcgggcatccttcgagctatggtcctaccatcatatccagagcataagctcttcctcgggtttcctagtgaaactgttgcttttaatatcaaagaagatttccagttagagctagacccatctctatcaaccaaagaaaggacgattgcgctttcagggacgaatggtgagtttgtacaagtcacatctacttttctttgtatctacgattctgcaaagcgctctcgtttagtttatattgaaaaaatcacgaacgctgcttgctatcaagaatactccgcaatcgttatcaatggaacagcattggcaatatttaaaaaagatacagaagttgcacgaaaagtttttgaaagtgaaatttcttgccttgatttttcagcgcaatttcaaataggagttggattttggtctaagcaggtgatgatacttacattctcagataattcgtcaattagctgcgcctttcaaaccaacgttccatcattgcccagaaatattattttagaaggagttggtgttgacagaaatcttcttttagtttctagcggaagtggtgaatttaaatcttatgtacttttcaaaaataatctggtattctctgaaacaaaacatttcggtacaacccctgtatcgtttaggagatttacgatgaatattggtacctatatcatatgcaacaatgactgtccacacatggtatatgggtttaatggagcactatgttatatgccgcttagtatgcctcaaagttatgatgtgtgtcagtttcgtgataactcagggaaggattttctcatttctgtatcattagggggcttgaaattccttcaacttaatccattgccagaattgaccccaagaaaagtacttttggagcatgttccgttacaagccattatttttcaaaataaactgttgcttagaacactcgagaatagatatgaagattacgaaagttacaaggaaaattatcacttggagttggtcgatagttatgatgataattcgttcagggttttttcttttaccgaaaatgaacgttgtgagaaagttttgaagattaatgagagttctttacttgtaggaacaagcattatagaacaagataagttggtgccggtaaatggaagattaattttgttagagtttgaaaaggagcttcagtctttgaaggtagtttcgtctatggtactatctgcggccgtgatagatctgggggtatataatgatcgatacatcgttgcatttgggcaacaagttgcaatcgttaaacttaccgaggaaaggcttatgatagattctaggatatcactaggttctatagttttacaactcatcgtagagggtaacgagattgctatagcggacagtattggacgttttacgattatgtacttcgatggccaaaagtttattgtcgttgccagatacctttttggagaaaacattgtgaaagcagcattatatgaaggaacagtttatataatagcaactaatagtggcttgctaaaacttcttcgttataacaaagatgcaaaaaactttaatgacagattcatttgtgaaagtgtgtaccatctgcatgataaagttagcaaatttcaaaatttcccaataacaaataccaattcgtttttagagccaaaaatgctttttgcaacggaaattggtgctattgggagtatagtatcattaaaagataaggagctagaactggaggaacttacaagaaaaattcgaaaattaaaattttcatacttgtcatctatggactacgaaagtatagaagcagacctcatttctccagtcccgtttattgatggagacttggttatcgatgtcaaaagatgggcatcttcagaacttttccgattatgcagaagtgtagaacatagggaatcactcaattcttaccaaaaagttcaagccctccttgaggaaatacaaagtttatgttaaacgtattattgcctttttgctctgagttattatcttacactttatggatcattgcaaatttggaagtttggttctaggactgtattatgcatttgtgagtaatacaaaaaaaatcttttgatttataattataagtcacaagctgtcgcaacatggcactgataaatacaagtacataaagcttggttaaaaagttatcagtctcaatttctttcgtaaaatcttcttcgaaattcaagatatttgtcataattgttgcatcgctcatctatctaagacgagatgacatatattctggatttcaataattaaaatgaaactattaaatttcatatgacagaaactgagcacttcaactggcataaaagctcaaaggaattttttaagctaaaaaattaaaaaaaaactttctccatttggcgatcacgtgttgccaagtatttttggagtgtaattaaactggagaaactctagtgtaatttctctataggaagctagggtcagaggaaattaggatcttaaaaattgttagtagaataaaacatgaactaaatgcttacctttggcaagccactttttgatttgatcttcagtttatggtctttacaggggatggttttctgagtaagaatatctgtaaaacttgaaggcacttctttccagtgttctttcaaatctatttcaactttaaacgacgaggtagagccttcattgcttatggctataatgactcctggacgagtaaatacataaactgaatcgtcaatgtatagttgaaaagatagcacgtatgtaaactctgggtaggtctcaaccaaattttgacgcgtgcgtatcattgaagaaagatgtctaaacattggattggaagtattgtatttacttttccaaagaccttctctgttgtcaggatcgctaccaccgtcaaacatctgttcttgtccataatagataattggaataccgtccatgaaaataagtgcagttaatgcgttaagagccagctaaataaatgttaaaatatataaaaaatgcaggtactaaattgaaatattgttcaatagacttacggcgatgtctttggtttcatgaaaaaagcgaggaaaatcatgattttccaaaaagttacacaagacggtaacatctttgaagtaatgtcgaacatcaagtacggccttatcataaaatgaaaacatagaatgtttggggtcaagaaaggtttcccgcaattgaaaaaataaagggaaatttaaagtcgaagggagatatttttgataatccccgacgactttaggatctccatgaaaaacttctcctgtagtaaatacattagctgcttcaataaatgttgggaagaaggatttttcgacatgtttggctgtgtccaatctgataccatcaaattgataacgtttaattagatcagaaacccaattttgaaaaaatttgcgaacttcattcttttcggttcgaatgtctggtaggttcacatgtgaatctcctaaccaacctgtaattgtctcatggggatcatcgtaattttgtacaaactgccagttgtgataatacttcccagagttaaatggttgataaagtaagaagtttacgggtttgcttccggcatgacccatatggttgacaactatgtcaaccatgcaaagcatatttttctcatgaattgcattgactagttctttcaaatcttcttctgtcccaaaattctcgtttaactgagtcatatcttgtgcccaatacccatgatatgcctgaccacaatccgtagtctcagatatgtttttaactattgggctaatccatattgccgtacatcccagacttttaatgtaatcaaggttacgagtaatacccttccatgtacccccaaggtaaagatttccgctagcttttgcataaaaattatcctcatccaaagcaaatctgtccgttaatacctggtatataacttgctttcgccataatttaaggtaggaaggttcttttttcggcagaatggagcagattagattcatagtcccttttcgtcaagtaaacaacattcactggtaactgtctcgtttacaatgcagctttaaatcaagccttcagctacgccttcgtctggatcgcttcttcagccttgcttactgatcaacaaagagtcttcttctcgaaatcttccctttcagtacaaatttaaaaaagtatccgagattcgtacagaatttgttttacttttcaaaaagggacgtttgctaaaaccgacactctcacttaaaggttatagtcttttggctgcttttattaagagccaaaaatatagtaagaatattgaaatacagagggtcttaaatactccgcctttcggttccgacgattgcggctttttttttttaatttcaacgcttttcggcttttgtttacattcaacttgtactaaacaaaacaagttaacacattataaggcatgcatcgttaagtaaatagtaacgatggtagttggaaaaggtgtatgtgctgggtttgttgacatttcaaacctactgcaaatgcgcatgtaaagcagagaaaaacagtgttttatactgcgtaaatattcttaaactcgcttgtagtttgttaactgacattatatttgatttagttattttctgtatgcttttcttcacttggtaataacagaaatgaaaaaatgtattcaaaatacagcattattgtcaaaagaagacgaaaactcaaaaatttttttaagttaaaagacaatggaaaatggaagcactccattttccattttcacgctgtctgtaattcaccaatccatcgtaatgatggaagcttgaacaagctagttaattgttatgtatgtttttcctcatacattggaagttagactatgaatagaaataataactggactatacctctttagaaacaaatacaacaaaaagcaaaaagaataaaaggaagcctacagcaccccggattcccatgttgtctccaaccatagtactaacgaggccctcagacgcttaactgcagtgatcggacgggaactggtgttttcacctaggtatggccgtagacatttgttgtgttaaataatagtatttattctgttattcaagtaggttaactagtgagtagttcatagaaaaataacttgagaaatgacaatcttgatatgaatgatcattgaaataatttgaaaactaaaaaaaaaaaattgttcagattgataggaatgctacgttaacaaaaattgacgatttactcgctcgtacaaaattgatttttatatgcattctcaagtctagtgaactcaacagcatctattccctgcgatgctattcctagtacgagaataggagtagttcactcgaatgtctcgtttcattggggtagggaaggaaacacttatatatttaccatactttagtatttttattcgtaactcttttcaaggaatttttttcaatccagtatcattagtgctgtgtctaaataaagaataaataccaatttcaaaccagtcaatgcattcgttttcgcaacccacccactagcctaagctatgaagcctcaaaaataatttggcgtacagacattttaatcaacattaagcttcacaataaaatgtcaacgaatgtttagtaaaaagacattctgactattaacaattaaaagacactacattttgtaaaatatatattatgtacttaatctcgtaatgaacaagcaagtcccgagtggctcaatcggtttagagcgtctgactcttatgatggtcatcagaaggttgcgagttcgagtctcgccttgggagttagtttttacatttttgagaaatgagatgcaccgatcactgactcaaaggttttgtaaaataaaggcttcatttaaattttcgttcttgtataaagtagaaatcaactgcgaaccctaaaatgtaacgaccgatagatccatactgttagcacgttgctgtaaattttttaacttattgggagattatgaaatgagattgatgttagaaagcttataagcaacatatacaattacgctttttttcagaaatttgggtaagtatcatttattttctttgtttattgtcaaacccactttccgatgtacattaaagaatcgttaaataaaattacgaccttttgtactttcgtagcttcacgtaccggtacattaaacaaaattttcaagtggtgttatgtttcgttatgtgtgtttgctacacggtatttcctcgaccggatctccacctgtcggtacattccaaaaaagcagtaaaagtgttaaattctcagaaagcggctgaattttcttcgaaaattttgctatttagaagcgcctttacggttatataagagctgctaaacagcttcaaattgaactccctttgtctccaaatttgtaggcttgttttgaaagcttcaaagaagaaagggttggagcgctccaaatagccctcaagatgaaagggattaaaagcaaaatggtaagatccatatctagtgtttatttgattaaccagaatctagctttctcgagggaaatctcaagatacccagaagtctagcaagaagaaggaaagcaaaaaatcgaattcccatgactctagcaaggctccgaaagaggtacggaaaaggtttttacttacttttaacattttcatagtctccctcgacggatcccaatggttctgtgattggtgcccaaaacgactttcttactgttccaaaacattcaggaaagaaagtacctattgataccacaccaactcctagagatgagatcttattagagaatgtcaggactgttcgtaaacaacgttcatccctttaccatatatctgaaaatcgaaacctggtccgtcttccatcctttactggtatgttttatggatacacttcattgattgttttaagtagttataaaagattttgtttcttattagaatgtcatgaaattggatggtgttcaatgcggcacatgctggtgtcgcttgtggatttactgttcagcttgatgtgtctgatatcgaaaaaggaatccttccattttttctcacatttcattttattttactaagagatgatttaaaccacaaacattgaataggattttctttctgatttaatgtacttggtgttgacaaacactgaggtgttatcaatatactttgttgtcaaccaatttaatttactaacctgtctatttagatgttcctgttaataaatggcactctctggcgttggaaaaattagaacaatgttgcgttgttttcgatttcaacgatccctccaccgatctttacggaaaagaagtgaagcgagaggctcttcaagatctcattgatttaatatctgttcgaaaggaagcaattgatgagtcattgtatccatccattgttcatatgtttgcagtaaatgtgtttcgtcctttacctcctccttctaatcctcccggtgaaatcatggatcttgaagaagatgagccggctttggaagttgcttggccccatcttcaccttgtttacgattttttcttaagattttttgaatctccgtctttgaatacatccgtagccaaggtgtatattaatcaaaaatttattaggaaattacttgtattgttcgacagcgaagatcctagggaacgtgattttctaaagactacacttcatagaatatacggaaagtttctttctcttcgtgcgttcataaggcgctcaattaataatttatttttgcagtttgtctatgagaacgagcaatttaatggtattgccgaactgttggaaatcctcgggagtatcattaatggatttgccctaccactaaaagaggaacacaaaatattcttgtcacgtgttcttattcctttacataaagccaaatcccttcccctttattaccctcaaattgcttatggaattgttcaatttgttgaaaaggattcatctgttacagaagaggtatgtatatttcctagtgtttcttacgttttatctaacgatgacaatataggttgtcttgggcttacttcgatactggccgaaagtaaatagctcaaaagaagtcttatttttaaatgaaattgaagatattattgaagtgatggaaccttcagagtttttaaagatccaggtgccgctcttccacaagttggcaacatccatatctagccaaaatttccaagttgctgaaagagctttatatttttttaacaacgactatttcgtgcatttggttgaagaaaacgttgacattatactaccaattatatatcccgcactctttgaaatttcaaaaagtcactggaataggtaagtagttactcatttaaaatccctttttattttctttatttaagataaagaaagtggtttattagttcttgctgacgttttgttagagttatacattctatggtttgtaacgtcttaaaattgttcatggacattaatccttctttattcgatgaagttgatgctgagtattctgagagtcgtcggaaaaaagaagatgaagaaattatacgagaagaaagatggactatactagaaaacatcgctaaagagaatgctatgaaacttaaatctcaaaaccctactactgtgcactctactactgagagactaaaaaaactttcacttgactacaccaatggttaggacttgcatattttaataatgatccatatattgtacttagtctctaatattccctcttttacattttacatactatatcattttcagttagtatttccttttcttttaattgattgtaataaaatataaatcggtaacttggtagcaatcttcttttcaaattgaatgttgcaatctcaagtgggcctaagctagaagggttcatttttttgtttgcataccccagcttaacctaccactgagagccaactgtaggtatgccagtgaggtgctcctcaacttcagcaaaagcactaaaattggcataatataattgttattgaatatgtcttgcattcaaattatttcatctagtcaaacttcaattgctggtcatagaaagctatgcaacaaattgtttaccctacggacgcaggaaggatttgaaaccgacatcctaagggcgctaaatattatattaactgttaaaaaaggaaactcaaatgctgaccgcgttttgaggttcctagtaacctttgttaattaccttcagcagaaggatcctgagatagacattgttcaacctatcttaaaacatatacttcgtgggttagatgccaaagataaaactgtaagatatcgttgctgccaaattattgccagagtggttaattgtgtaaaagaaattgatgatgacctttacaataccctcaaagaaaagcttttgtccagagttttagaccgggaatcgatagtccgccttgaagctgttgttgctttatctcggcttcaagaagacaccggtgacgaagaaaacgatgttcgaaatattcttttatttttattgcaaaacgatcctagctctgaagtgcgaaggtctgttcttttaaatattgaagttagcaactcaactctcccttttattcttgaaagagcacgcgatgttgatgctgccaatcgaaaatgtgtctatgcccgagtattaccgaaaataggagattttcgttatttaagcataaagaagagagtaaggatattgaaatggggattaaatgatcgtgatgaatctgttgaaaaagccgcggctgatatgcttgcatatcagtggattgaaaacgctgataacaatcttttggaacttctagagagacttgatgtgtctaacaactctgatgttgcagttttagcaattaaaaaattctttgatgtacgcgtggatagtttgtctcagctggaattccccgaacaattttggttagagcttacagctgagtcttccttgcttgctaggacattcaatgaaatttgtatagagaaaaattacactgaccttttggataaaatgcctgaagttgttcaacttacatattatatcgaaaggcagtatgtttctcttagagacaagtcttcttatgatgagtcatgttttataattgaacaactgttatacattggtctaagccaggacatggttgatgaaattggtcgcagaaagcttttaaagagtcttacaaatagtctttctactatggcccttccagattcactaatctctttacatatagaactattaaggaaactttgctcttctgaaaacgatttttgctcattgctagttgaaattattacggaggtgtttgaacaaggacattcacaaaaccagactgaggaacaagggaacagcaatgctccagaactgaataaaaatgattatgagggtgaggagattactgtttcgcaaaagtcaccatctccatctttaccacctaatgaactaaatgagcctgaacctgacgacatggatggatataaagaagcttttaatgagttaagatgcctttcgtacgttcagtgtctatttgaaaacatcacatcctccttaaatgaaaacttatatatggtagacatgcttaagactttaattatcccggctgtgaggagccatgacttgccaattagagaaaaaggattagagtgtcttagtttggtttgcttgttgaatgctgatcttgcatttgaaaacgttcctttgtatttacattgttacgagaaaggttctgtggttttaaagtgtaccgcaattcgtacattgactgatatgttaatacaacatggaaaagccaagttcaccgaatatgaagatgctatttcttctatactttttgaagctttaggggaattcgaaaatgccgaattacagactctcggtgctgaggcgatagccaagttgttggtaatattgcattacagagacgaactggtatgttgctgtgtttttataacttacttacaacaactagtttctaaaacccctcatcattcaatattttgagcctaacacagttgataatcatgcgctacggcaagttcttggctatttctttcctgtttatgcctttggtgcacacgagaatcaatggcgaatagctactgtaaggaaaattatcattattttttattgaacaaacaatagataattaacagcattttagatattctgcgatgcactattaagcttattagaaatataccgcgatcttgatgaagatgatgttcaattaagcataggacacatagctcagcaaatgttagattggactgacaacgaaaagttgtatgaaagaaaaacacaaacaggagatgattatatcgctttaaatcataatgtacatctacatttagcaaacatgatttttgagtcgttacctaatgcttctgaaggtggggattaaatacaagaaacgacattaatactaacaacaaatgtaggaaaagagagaaaatttatgatatccttattggggaagcttaaaatccctactgacttgccttcatcagattatcagaggacaaaacgcaaattagaaacatacgagagtgtaagttaatactaattcagcgagaattattcaaaatggttctttcaactaataatgtatagcatggtttcaccatggattccaccagtttgagcatacttgcgaaatttgaaaggatgttgcttcaaaacgaagaagctagatccaaatttgaagaaacagaagaagaaagattaatggaaaatgctgaagagaatgaacatgctggagctgaagccatatctggcgaaattattcctgatacagtggaagccaacatggaagacgaggaggaagtttatgttaaacaagaagaagatctttaaatcaattgagacagatcctttctatgaagttcacggaatcccttccgcatatctttcagaaactgataaaagtctctagtgcgattaaccttgtttaccaaatcatcaacatgtggtagaggtggatgacaatgcacgactgaagggattagtttaagctcaaatctaaataataatttttttaatcccaaaagatttcttacctttataatccctttcagcaagattgatttgaaatgaaaattgtttgttccaatctttttcatcaatgtttgtaaatataaatctgatgacttcgtcatgaactccttccattttcaagcccaaataatcttcccaaaatttaagctctggattattataagaatcctgtttccgtttcgcctccatctcttgagccctcaactctcttttggacgagatgattgcgcggtaatgatcaagttcctcagagagcttttgtttccttttcaacattgcatcaagcttttcttgaaacgaaaatatttcctgttctgtaatagcttgctcctcatgctctttttctaataattccgtaaaattctgttttcgagcctcagtttgctcaaggcttttctctgccttcttttgtgcctctagatcaatgttaacttaaaaaagcagagtaatcactataaacgtaccattaatttcagataattgacgcaaatattcatttttgttattcagaagcttctttctctcttcttgcaagaatcgatcgaagatgctgttgaaattcgaaatttttgatttcaaactatcgtaatcaagttctatcgttggaaagtttgccaaagacatagaagaaaatgattttctctaaagtagagtgctcaatgttatgctaatcgaaagatgtgtgttaataaaaccagaatataaaaaatttctaattcatgtcaattttatatattctataaatcgtattgtaggaaataaatctaatagattgtttggtggcttttatttagcaaaagctttggttccactaaaagtcataggcatttattcgagacttgcaatttcacggcataaagcaataaaaccgtttaatttctccttatgtttaaagctaatagatagtaaaacttattttgattttatataaacacactacaggatttgatggtagggatttaatcatttcaaccatttacgcttcattgtgaaacaggtatttgaaccataagcttgacattactacttttaagtgccattcatttttcgctcaattctttaatgttgtaagtacaaatcgttctaattacatttgtctcaagactcggttaaaacaccatttctttcaacgaatatattaaaattcatgcttctatagaatcttccacttaagttcatctctgcattctgttcaaatatagcttccagttgccgttagttctaatttatgctttctacgtacaagccttttggcctatttttaggtatccttcattgttcaaactagtaattagattaataaagcacaaatttgaaactttcaagaagctttttcatgtgattgcatagaatgagaaaacccaaaacttaatcctaatcggctaaaaaactatgttctcaatacactaccattattaatatacaataaatccaattctcattttacgaagcaagagcaattaacataagctaaccgagctcttaagaaatctgcaaataattgtcgagagcaatcatacaaggatgcttcacgtttacggtttagcaaactttgctagctcttcagtagaaatagaaacaaattttacacaattataaaagcaaacgttaagtaattagggaaagaaaaaggaaaacgagaaggacgatgaatttttaatgcatatatttttataaaacagtaaataaggtattagagtaaaatatgccatatgtgagtacattataataacgagggaagtaaactaacgtcttcgaggaggcttttgcatattttgaaattgattgagcataccgctgaaatccataccacctgcccctccgggacctccgcctcccatcaacatgttagccatttttgaaatatcaccaaagttcatagaacctggattgaggccaggcattcctccccccatacccatggcttgcattcttttctgcatagctgcaagttgacgagggtcttttttgagagctgcggctggatttccaccaagtttacccaaaattccatcttttcctcctatctttttcgccatttgcgcaaatactcggacctgagaaatggtttcttctacctctaaaacgcttgtaccactaccccttgcaacacgtaaaacacgagagggttgttcaacaaatagaagaccatccgaatctaactcttgttcggtcattgaatcaacgatgtagagcatacgcttcatacgcaaagatccctcctcatcattcataccgttcatcatattactcatgcctggaatcatactagccattttactaagtggtcccaatttcataatatttccgagttgatctcgaaagtctcggaccgtaaactttccttgctcaagatttttaaccatattctttttatcaaaatctaaagactgaacgtgttccatcagaccttcaagatcaccgagtccgagtagctttgagataaaagaacgtggagaaaagcgctccaaatcattaatatgttcaccggtaccaatgaacacgatgggtgtcttagtcgcagccacggcggataaagcaccaccacctttggcatgtccgtccaattttgtgattattacagcgccaaagtcagcagtctctttaaacgctttgctttgagattcggcagcttgaccaatgctagcatctaaaatcataattgtttgatctgggcgaatagcgtctgaaatttccaccatctcagcaaacaactcctgctcctgctgatgcctaccagatgtatcaacgatgataacgtcaaatctatcgtttttgaacttatcaacaccttccttggcaataacgactgggtcagtctcggtgtaactaccaaagtaaggaacacgtgctttgatagcattctgctttaattgatcaaaagcaccagcacggaaagtatcggcagcaaccaaacacgatttcaaacctctcctttggtagtgcagagcaagctttgagcatgttgtcgttttaccactgccttgtaaacctaccatcatgatcactgaaggtctcccttttttaggagtaaaagcatcaactttagggtcaaccaaactgcaaagttcatcaaagacagccttctggacgattcgcttcccatttataccctgaggcaaagttgatacattgatttttttcttaatatttgaacgtaattcttgaaccaatcgcacattaacatctgtttccaaaagtgccgtacatatatttttcagcagagtatcgacaagctaaataaaattattagtaaaggttcgtattaaaacgatagatatcctaatcaaaacagaacattgggaaaacaaactagaggtcattaaaaaaatcttcagctgcctaaaagttgcttggtaagtaaacccttttagtaacttgaaaccaaaatctaacattgcattattaaaaagggttttaaattttcatgtcaaggtaacgtcgatgtaaacgaagataatcccaatatgcaatcaagatatatatatataagagattggataaaccagctacgcaactagaaaagcatatctgtggtagatgatttttcttatcgacaaatttcgtaaagcatgaaacgatgttcatatacagcgtgtaaaacatggcaaatgcaaaatttttgaagaaatcaagcaaagatgtattaaatatttttataaatgacatggctcactctccgtatgagaacaaattttcgatagaataaaacatacctcttcattcactgaagtggccttagaaaagtcccctaacgcagagttcaaacgacgccctaaatctgcaaaaaccattttgtcagattaaaaacttccaaccaggcaatttgaagttcgtcaaatgtggttggtagaggatgaagtcgttaaggacatgcagtgtcttcaagcgaaaagtcaatagacaattgaggcaatatgataaatgcctaaagatgaagtaaagaagagtttgatattatctttttaaaaaatattttcactgagtttaataccgagttatttcgcctgcaagctttttattgttttcagtataggtgatatatcgacaggatagcgcagcacagcattcctatataataccttgtttgtataatattttagaattaatctatagcaaaagttcagtaggtataatcttaaaaaataaaatacttattaagattatactcatgtgtaaaagtgtttgactaggtcctgacaattattgatgcttctctttctcacatttgtaatagaaacacgaatcgtaaattccgtggtggctaactttgtcccacaatcttttgattcatacttgctgtagtttgtgttttaagacgctaatagaaaaagatctaaaagattgatatttgaaactttttatatatttttcaggcgtatgttcttattcaccttaaacttttttggaatttttcgtgcgttaatccagcaattagtcttaagatccagtttttccaaacttcacgaaggaaagcacttccaagtccttataagagccagaatgaattgcaattagctgttttttcaatataagactaaagataaagaatcgttaaccccttaacacaaaatttgaaaaagaaataacatttactacgcgttatgggtgaatagttatatttgtttacataatagacttaaatagagaggtgacgcgttactttattaaaataaagatttgttatatgaaaaaaagtaattagagctcttttaaatgctgtaaacattttccgctacacagtgtatttcgtaaaaatatgtacaaatttaaaggcgaacacggaattctgggaacaacatttgggtggttatttgtaaaaacgataataaaagactctttttagaccatctaattcctctaaacgtgcgaaaattatttcttttcggacgctaaattggtctcgtgttgcaatatttaaacattcaatttcttgttgaattttaacgtggatggcagtatgagcgaaattaacgactttacgaattcaattattatcaatgaaagtgatacgaaatacgaggtttactctgaggtgaattccagtaatagatggattgccaaagaggattgccctagcccgttggaagatgtatggcttctaaaattagcaggccataagagaaaattggaagagcctctaagttgcatgcgtaatgaagaacctgcatccaaacaaagagagatagaaaaatttttacggactgatttggatcactctgaaaatgactttttaactcaagaggtcgatgaattcccttctacccagcagttatttcctattcctttgcaaaatgacactgcctttgattcttcggaagaatctattactaaatcttctaaatcctcgttcagcgtgctagatattggccttccaatgtctgcgcttcaaaggaaaatgatgcatcggttggttcaatactttgccttttgtattgaccatttttgtactggtcctagcgattcaagaatccaagaaaaaatacgtctttttattcaatctgctcataacattgcaaagcatcctagtctgtatgatactgaagttcgaaatccctccgctgctgaatccactaattcccacgtttctttagatgcttctaatttctcttcatatgccgaaaattcttcaaaatttctttttttgcaagaattattcaaaaatctttccccctcttattctaagacattttttttatttatctccaaccaatttcttgcaaacacacttactcaatggctaaaatctcaaaacattgatgctgagttatgggctgaagaggatgcaaagactagccaacatccagcaatttggatttgtgtgtccaaaaaggctccctccgcttctcattttcttcaatcttgcccagatttgagtgcaaccattttttatgatatcgaagcatacatgagtgtcactagttccttgccctctattcaaagccttgtccttaggctcattcacttgggatctatagaacatgccataaaatgttttcaatcatcttacaatgcctcatttttagtgaacattgtgggtgtggttgccactcttagttcttcttccgaggaaaattcagaagcttcaaatttgagcactttgtttgagaaatctgggaactttgaggaaatcctaggctcagaatctcactcttctattacagaaaaaactcgagatattgctaaaaatgttgcgacctggttaaaaaatggagaaaacttctcttcttggccactacctcctctaatggatttagcaagcttatcggttgcagaaccaagggattctcagccttctgtttctcaggtgaacgatacttttgtcaaatcatctgatagtacatttccttcgtcgcaaagcatgcaatcaccttccaaactccactctttaacaagtaatgccaccgatttactgtcatcaagctcactaaagaaaaactttttttctcaacaggaagctgatgaggtagaactttccaataattatgatctccaaggtgcagctgtccaatacctgcagcgtcgtttaagaatggtagaagatgaattacacgaagccattaattccaaaaacgtacaacaaagtcgctcagaggagttggagcagcaaatttctaagctgacggataatttacaagaatacagaaacactgttcgagagctcaagctggatttggagaaatcgaagaaaaagaatgaagacctttcaaagctagaagttgagaaggttgaagaaatcgcaaaccttaaaaaagagcttacccacttagctaagcaacaagaatttggctttaaatatgtacaagaattttcgaatgaagatctacaaggcaaattaattgaagccaacgaaaaaaattacaaacttactcaactgttaaaaacacagaaagaagacgctgatttcattactaatcaatatcaaaatgcatctacttttgctgctgagcaaagcaaagaggttgcgaaacttcaagctgaatgtaagcgcttacaagctataaattctaaagttatggaagaggtaaaagtttataatgattcaagggtagaagcattactcgctaaggtctcttctctggaggagaccttaaaaattttagagcagaagtctcttcccaaatttactccacataatcaatcaccaaggattattgattctaactaaatcattaacgatcaagaacttcagtggaatcaactataaaaagttcgtttagtcatacggttatttgattaaattatgtcgtaatcagcttttaatgaaacaattttaattgtattaatttttcaacagttgcaaaaatatattggttttcttcatatattcatcaagaagttagacatttcgttacatactagattcaatgatctatgtcattaattttgaatttgtttttgaaagattttaattgtatcaaattcgaatatgcatcctcaaaagatgcaatatcaacattgatgaaataattttttatgcttcatatcattttgttatgctcgcaatatcgaacctgtataaaacttcatgcaccttatgctcaacaggtaaggaccaaacaaccagcaaggattgtaaagcctttaaatactaatttttcatctgaatagcacggtcgagtatattcggcttcttactatctttcttagcacgatccaaagccaatgtaccgtttagtttttcaacaacatcatatgtaatgtcttcatcattcaaatagacaactctattgttatcaaaatccaccacacagaatttaataacgctgaaaatgctttctggatactgtgtgcgagctgcaagacgtagttttgtatcgatgaatttttcctggggtttaatgacaaaactaaacggaattccatgaattcttgcaatatccttgtggaaatgatggacctgtacaattttctcttcggggtatagctgcagctggtctaagggtacgacttcaccaactaaagtagcggcaggattaatggtccttataagagtcctcaacgaaagatcacgatgatatctactctcaaaaacctcatataccctaacttttttctttcgcaaatcgctatccggaaatcgttcacaaacagcaccaaataggtcgttgatatccccagatttattgatgtacgcttcgactaattcgatattagctaatccgtcaactagccagcgtaatcttactaaacgcttacgatccaagtctgaaagacttacgtccatagtctcatagaaaataacattagatggcatttcttcctccgagctgtacaaaatttcatacagtgtaatatttgaatcgttagggactaccatcccagcagaataagtcaatggattgcaagtggtaagtcgaatatgatcagcaccaataccaagtttttgaccaagttcaatacatagatcatcatatttaattcttcggtcgagcagcatttcaaattcaataatgctatcttggtcaataaatcgcgggcgaaataataccaaaaccttattgctcaaaaagtcgtataacttaagggcactatcaaaacctgagttaacgatatcatcttctaaggcagatgggcggcatggttcaaaacatataatatcaccagtactcaattcactttgtgtaaacgttttttctaaccgaagaaaatcaaccatccccggtttaatttcttcatatatatttaacggggtgttcttcggtaaatttgctctttcgcatagtaacggacatattgaacgaatttcatcgcttttattaacgtggagagttccacatccagaaatctcttgcgattttcgatcaaaatatttaacaaaaatgaaggcattccattctccagtattttggtgtgtaagagaagagcttagctcattttctggggtgatttctaaatacaagcgaaggatttcaccttgtgaattccatacgtttttcacttcctccattgtagaattcagttcgttcacaggagattccacgcgtacggtacagttatgtcttttgacaacataccaaaaacgcatacattcctgaggatagcccagtttttcagcaacaattgggataaactcagaaaacttggcctcctttttaatgcgaaattgaggtatagtttcttctttgtaagcatttccaaaatcggcaatatcaaattcatgatgttcactgtaaaattctggagtgattaattgcactttagtatacagatggctctctagtctttcttttctgcgaagttcagcaagttggatactgggattcaaagcttctttcaaatgttctggaatttcatcagcagaaactggattcatgagttcatctaatttatctttgcgcaaatataaaagcatgtatgcactcatgaatctttttagtttgacaggagatctaaaaggaggatgcatgatataatcaccaccatagttctcttctaaaacttctctcaaagtagccctggtgactctcgtgtcatcatatttataccaaggaccatctttttctgtttttaataacgcatagtaatgcccattatgaagatcaccagaatggaccaatacaccgtaaagaacatactcacaattctgagactgatcggcttcgggacttaaaaacgctttagcatcaaactctaatggaaactcgtatcgatcgtttatttttatcatcatgtccctttcaaaatcatattcaaatcgcttcaattgcaaatgtaaaataggagggaaagattcaaaaattacaccctttttggcttcttgaaatccgtaagtatcagcaaaatagcagttatcaccttctaacgtctcgacttgaatatagcttcgaaaagaatcctctaggtttttcattcctttcacatttaactgaatatcccaataatcttcggaacgagcagattcaaaattaacatttacgcacgcaatataacttttcattttaccgacaaataagttggtaagtgcattttcaaccttagtatccctcatgcttcgttctaagttatcctgtagaacacggttgaactcttggacgtcatgttgcataaacgaatctaaagaatcccaaccaaacgatttagtaagttcagtggtggaaacgggctcattcataaattgaaggttatagaaacagcgttgcaacgcgtatgcaatactgtccttgccttgagggctatcagtaggaatttgataaacgattcgtcgaaaagcatgtattatgtaaagggattgtaagagagaattcatatagcaggtagcaccttggttctttaagcctacatatccggtggctattttagagtcgtagtcattaaaagagtgccaaagtacaccagtaggatctttaagaattcgaacataggcggtaagaagtaaggcgccatcttcaacaatcggagggacgtcgggagcttgccggcataatagctttttaagctcggcaaattgagtgaagccccaatccacaatctccggtgaaaatcgacaatgagcagagttggcaacgctcaaagaaggcttccttggatttgaaatgacaaatgcaaattggcaacagcaaccatacttattgctcaatttttcttcttcacttggaatatattccaaaaatattgaagtaaatccagccgattgaagagtgccttgaggaaaataggtaattttaaattgccgactgccaactgcaaactggggactcacagctcttcgatccaactcatgccagctctttatatgccaagtaaatctctgaaaaccgctttcttcgtaatctggtaaagcgcgtcgcaattcctcgtgtattttaacgtctatgacccgttagtaacatgaatgtaaataacccggtcataagtaattttcacactaagtggtcacaccgacacgtaccaatggaaacattttcttcaaagtcttcttttaatttctcattcaagagtgtatcattattaatgagtgacttttgggagtctactaaagtttcacccgtgacctaaacattataagttagaatggtccgagatatcaacaaaaacttcaataccatgaaatcttagaatttttttagttgtgaggctttcaaataataaaggaacaagtaatgactgtaaaacaatggatttgaatatcggttctggtcacattaatcctagcacatttctatattctaccatctcgtaagctatacacaacgacatattttttattatcgttaagttctttagcaaattccaaaattgatttgttttagtttattgcctcgcgctattcaactcttcaatgtttcttgcgtcaatcaagaaaatattctataacgacttgaagctaccaattttacattgtccttaatgcattaaaggaatgactgtcttattgtaaacagctacactagtaattattttaaaaagattaccatattatcctactaatacaaagccattttttaaatgttcaggtataatcgtaaaagcaaaattacaagcgctgaacaatcacacaaaatatttgttgaaaaatgatatgtatataaatatatgttatagctgcaaaaaatgatccaattcgtactcaaattttgacgaatcgcttcaaaatcagttatccacacccccattaccttgtccaaatggcaagaaactttcagtgcaagtagctgtataagcataggatgtgggattatacgaattgccttcagagtcgacgaagctaaaatcaaacccacctttaccagctccatttgcaacgacaaatctgactgggacgtaagtgtctgcagtcaaggaacccatgctaaatgaagcaatgccggtttggccgttagtagcatgccagtaagcataggtatcgtaatttgtgttggaccatccggaaatagccttgtcaccgaaccaaccataaaatacatcatcaacgttagtgacgtccaaactaaatgtatctgtaacaggaaccctgaaaaagaattgataaacaataaccttacaggcagagctcgtactacccatagcagtagcgtctggtggataaccaggaagattataagaagaagtccattgaggcacactatcagatgaactcaagacaccagtgaatagaggagaggattggtcaaggtcactagatccaaaataggctggctgggtgaaagaagaaacatctgttacaccactagttgcacaaaattggtttttcgaagaggaaatatcatagttataaacggcatattgcaaaccacgctcaccattgcatacagcagtagggataacaacaacagtagacgcaggcgtactagaaacatcatatgtaatagtggtagcaacagttcccgaatagattgtgctaggcccaggaagaataacttcaacagtacctggaacagtaccactagctgttgcaagagtcgaagtaatggtctgagatccctcatatactgtattagtaacagtgccaccagttggctgaactacctcaacagttcccgatacactaccggaggcgggcacagtggttgtaaaggcttgagacccagactgcaatgtcgtcgtcacagttccaaccgcaggctcaacgacctcaacggttccggagacagaaccagaggcaggtaccaaagtagttgtatactctacactacctgagtaagtagtggtcgtaacggttccaacagcaggttcaatcacttcaacagtacctggaacagttccactggcttcagcaaggatagtggtatactcttggtcgccagagtaaatagtggtagttactgtgccagctgtaggttcaattacttcaacggtacctgaaattgaaccagaggcagatgccaaagtagttgtaaactcttcactgcctgagtatatggtagtagtaacagttccaacagcgggttcaacaacctcaacggtaccaggaacagttccacttgcggtagcaagagtggtgttgtattctacactaccggaatgaatagtagtagtaacagttccagctagaggctcaactacctcaaccgttccagggacagtaccactggcttcagcaagagtggtagtgaactcgtgactacctgaagtgatcgtggtagtcaccgttcctgcagtgggctctatgtctttgaccacaacgtcgccatctgccagtgtgacagtatatgtggaagctacagtaccgctgttgattgtggtgtatattgtgctgtgatttgtggtaccgcggccagaagactttgacgatggataaatagtagtgatgtattcagaaggtccttctgagaaaattgtaataaattcgggacatgtggaagaagaggaggaagttgcagataaaactcgtttagcaaatttagcagaaacaggaggctcactaacaaccaccgtgaaaatgcttgtaaaaaaagtgaaaataaagaaacgaagaaaaagcatgatgaacttccaatgattaaataaattagatgtgctataagcaagaatagaaaagaagaattagaagggattaaagaattattaacaagaactgtaaaataacttataagccagtctatctcatcagtaacttgtagaaaatgagaaaaaaggtaaaagctcaaggctgtttagaaaacgtaaaatgtatagaagaaaaaaaaaagctgaaacaaaatctagttaaagcaactaactctggatggtcttcttgaccaaattaatccaagaactgcttttttttggaatcgtttcaactgtacaaacccttttcaaaagacgttcgtttcaattaaattaagtcaagctacaaatcttgggtcaatggcttgaatttatgtaaagtataaccagcaattagaaaaaaaaagctgaccattttaagacttaagccaaatttgacttgtttctaaataaagaagtcgtggttaccggttttctagcaagacacatcattttctcgaaaattgtcccacaaaccgcggtataaatgatagacaaatataataaacgaattaatgagaacctctcttgggagaaaataatggtgctccaagacgacttttacttaccgaagtaaacagttgcatggcagcaccgggctattattaaaaactagagggctgatcataaagcttcttctttattgatttccaagtgtcttgtgttgttttatcttgttccttttttactatcaaaaaaaatgttgtaactctttttgaaagaagcagaattgagaaacaaaagcaagattttccgctaaatgactcaaagagcatcaactgattatcatttttgagagaattgttgtgatagccttcacggtcaaaacttactgccgagaaatcgcaaagtccaaaaaagtggattggtggttctgttacaatggtaaaatgattctataaataagtatgttcatccaccacaccttgtcttcttggccactatgcaagcaaatagtgtactgtagaaaagatcgagaaagggatagggaagaagttaggttcaatgcttctttaaacatattcaaataaccctaactgccttatttgattttgtaacaacgattcatgcagcggcatgattctttcagtaaatttgacatattgttaagcaaacaatagagaggtaattgtttggattaatttaactaccagaaaaaaatcatttaggtcaaaatatgcgctgtttgaaagtcccaagaaaacatgcaaaaaatggaaagaatccgtcaaaatttgaagttttagcacaaagggcgagtaggaagataatctttactaaaacctttagtatagacgcgtagatatatattttcgaacgactaaatgttgaaatactgtctcattgacttcatgtctcattattttacaaaggtacttttaaattaggttggctggctaaagacatccacatatgccatttgggtgtgctttatacttaacttttataatttgtcgcgtgcaaaattaattttctcgataattatatctcctgtaaacgtggcattacttatttgtaagttataaagcactttaagagttaattttaactcaaataaaacttataaaaagttaaaggagcgcaatctgcggaagacagtataataactagttaacccactgaataaagtaatatgttgatctgataaaaaaaattctatcatatttgagtgcatcggtaaatactatttaacgatttgtaaattatgccttaaacaaattttctgtgtcagcaatactaaactacgctacgatacagtatgttgaaaatagaatatgtcacatgctttatttgctttatcaatttcttttgtgataagttattaaaaatagacacatattattaaagtatgattagataattaccaataacaataatagaatttttaaatcttatgaattaattaagacgaactgaacttgttcagttcagttataaaacagtatttaatgactgatactattaggctcctaataacaataaatataagattatcattttaacatactgcttaccgctatattgtaaatcgcaaaaaaaacccatcacatatcaatgtatcgttatacaaatacgaaactgcgttgctaacattttcgaggttggcagcaacgttaatgtaataaagaattacacagtccttcgtaatcgaacgtttttgaggtaaaatattaggacgctaagtggaatgtttgagatatttgaatttcttgaaattgtgtagctgacgagaatcaactcgttttaccatttttcaattgttgtctttaaaaataatattgattattagagaaattagtcctcatacttgaaaacattggtttgttctattttatccaaaaataccaagttcatcccgaagtattagttgtttttaaacgctcggacgagtgctacatgaacatttttcaacagttatctagcaataatacatttagacgcctttttacaattcgcacattgttgtgtcaccttcaatttaatttaccggaggagctttgtttcagagaatgaaagtattgtagcatagacaattgacaaaagcatgtaatctacactgtaaacatcatttcattagcaggtagcattaacgttgtttaaccagtatgggaagctctctagttattgtagtataatagtagaattacccatacaatttgggtcgttgaagcaatttcactaaatcaaatttacattgctgtttgtatacctaaaaacgcatatttcaaggtagtgcttcaccaacatatcgtgttcattgaaacaccaatatacctgtcaatattgtgtttctcaagattaaaaacatgatgggatttttctttgttcaaaacttcgtgacaaattcaacatgatgcgtatatacacataagttgcttcactgttcttctgcaatcaaacatttcttaagatttttaaggttcgtaaaatgtcgtttgagaacaatctaatatgagcatacacagcatcgctaatgaaatagcttcattaagatcgctttacatttcaattttactacgatatcatactcaggcaaaagcgaaattatgctcctgaacaattgcacgacgagaaagaaaatttaaaaaatacacacaagaaacacgtatattatatttacaaaaaatatgttacatttcgtactcaaatgctgacgaaatgcttcaaactcaattatccacacctccattaccttttccgaatggtaagaaaatctgagtacaagtagcagtgtaggcataggatgtggggttatacgaggtaccatcaggaccgatgaaatcaaaatcaaatccacctttaccagctccattggcaacgacaaatctgatgggtataaaggaacctgcagttaaggaacccatactaaacgaagcaatgccggttttgccagtagtaatatgccagtaagcatatgaatcgtaatttttgttggaccatccggaaatagccttactaccggcccagccgtaaaatacatcatcaacattggtgatcgcgagagtaaacaaccctgaaacaggaactcggaaaaagaattgataaataacaaccttacaagtggaagtagtattacccataacggtagcgtttggcggatacgcaggaagatcataagacgaagtccattggggtaaatcagctggtgaagtaaggacaccagtgaataaaggagaggattgatcaaggtcgctggatccaaaataagcgggcttggtaaaagcagtaacattggttataccgttactggcataaaattaactttttgaagatgcaatggtatagttataaactgcatattgcaacccccgaatgccactacatactgctgtaggaataacaacaactgttgaagcagcagagctagcagaactgtaagtaacagtagtaggaaccgtacctgaataaatagtgtttggcccagccttaacaacatcaacggtaccagacacagatccactagccgaattaaggaccgtcgtaaaagtactggacccttcaaatattgtataagtaacagttccggcagtaggttgaacaacttccactgtccctgacacacttccactggcagtgccaagagtggtggtatatccttgagtgcctgaatacacagtagtcgtaatagtgccagcagtaggttgaacaacttccaccgtccctgacacacttccactggcagtgccaagagtggtggtaaatccttgactgcctgaatatacagtactagttaaggttccagctataggctcaataacttcaacggttctggagacagagtcaaaagcaaatcacaaagtagaagtatactccatactacctgaatatgtggtaatactgacagtacctgcagcagggtcaacaatttcaacagtgcccggaatacttccagtcgcagtagcgagtgcagtagtaaatagctggctacccgaataaacggtggtggtgactgtgccagccgcaggatcaacaacttcaacagtacctggaacagctccgctcgcggtagcaagaatagtggtgtattcttgaccgccagagtaaatagtggtagttactgtgccagctgtaggttcaacaacttcaacggtaccaggaacagttccactggcttcagcaagagtcgtttcatattgagcacttccagagtaaacagtggaagttacagttccagctgttggctcaacaacctcaacagtcccagatacacaaccggcggccgtagccaccgtggtagtatactgctggctaccggaataaatagtcgtagtatagtacccagcgaacggcgcataaaccaatacagttccaggaacagttccactagctgtagctacagtaaggctaaacgtgagtggtaaatccatacatgaagtttgataaacagttccagcagctgtttcaacaacctcaacagttcctgaagcaacagtagtagtgaatgcctcactgccggaatatacagtagtagtaagagtgccagccgcgggttcaactacctcaacagtacctgaaacagttccacttgcggtagcaagagtcgtttcatattgagcacttccagaataaacagtggtagtcacagttccagccagaggttcaactacctcaatggttcctggaagagtttcactcgcggtagcaagcgtagtgttgtactctacacttccagagtaaatagtggtagttacagttccagccgcaggatcaacaacttcaacagtacctggaacagctccgctcgcggtagcaagaatagtggtgtattcttggtcgccagagtaaacagtggtagttacagttccagctgtaggctcaacaacctcaacggttcctggaacagttccgctcgcggtagcaagagtagtgttgtgttctacacttccagagtatacagtggtagttacagtcccagctagaggctcaactacctcaatcgttccagaaacagtaccactcgcggtagcaagagtggtagtgagctctaggctacctgaagtaattgtagtcgttaaggtttttgctacgggctctatgtctctaattacaatttcgccatctggtaaagtgaaagtataggttgtagctatggttccgctatcaattgtcgtgcgtatagtgctatggttcgcaactgaactagaagactttgaggaaggataaatggttgtggtgtattcagaagttccttctgaaaaaatcgtaatataatcgggacaagtgtacaaggaagaggaggaggtttgagatatagtccgcttagcaagtccaattgatacacgaggttcactaagaaccaccgtaaaaatgcttaaaaaaaggaagactagagtggaaaaacgaaaagaaaacatgaacgacttagattattaacaaattaaacgcgggctttgtaagatttgaaatgagtgactagaaaagagggactaggcggaattaaaaaaaaacaaaaataaaaaaacttcaaaaattaagtagtccgcctctcgcatcagatagttttcgctcaaaaattggaaaccaaatattgtacagaacaaacgcagaaagtcaaaaagaagtagagacgaaacctgattcaatcgaataacacaggctggtcttatcgatcaaattaaacgaaaccgctctctatatgacaactttaaccgtgagagcagtcaaagtacgtttcttctacgagtgtttcttattgaaagtataaagtattctgggtaaacagcaaactgtgggatgaataaccagcatcgtgaaagtggccagtttggggagtttttcataaacttagcgtatatgccggtaaccatgttataaacaggcacattacttgacgggaaatcgttccacgagtccccaagtgaaagaaatgtaaatataataagcgaaattgtcgtgggcatcagtactatacaaaagttgaggttttagctcagacaactttttacctactaaaccaaacctggttatgagcaacagacccttattataacattagcaatcaacaacaaaaatttttatagtattgatttttgatatcttgcgttcgttccgctttatcggaaagactttggcaattttaccgattctctagaatcatgtaaagtgacgaaaacagaaggcagaaagtccaaccaaatatgggcaaaaaaaacaaccacttcaataaattgttccagttaacagcagtttagttgtgttcaagtcaattaccagcgtttcgcgtgaaacgttacagaagtgtaaataatgaaatactgttgctttctctttgactctcattcttacacaaggtcactttgcatagtagaccgttgaaaaagtaaaaaggaatagaggagaaaacaagatttgattaatttttaaccacacccaacgtatccgcaaaatctcattgattcagtaacattgactatatggttctttcggtaagtttgactcgttattaaataaaaaaaatagaggcaaattgtttgaattatgtttgctatcaaatgatatccattgagttaaaaagtacgcgatttgatagtctcatgaagacacacataaagagagaaaaatccatcaactccacttaaatttaaaaaaaggtgaggtacatatagaaactttagtacaattcgtattgatcgcctaaatcaatatttttgaagtattgaaagttcaaacatgccttacagctcatttctcattactttgtaaggtagctggctaatgacaactatatataggcattgagccataagtatgctaactttcactattcatcgcttggcaaatctttttctttattaaatgtatctcctataaacgtggcactacttttttgaaagttataaagcacgttgggagctaatttcaactttataaacttcgcaaaaagtgaaagaaaacacaaaggtatagatagttacaagccgcattgctaagttgatctgataattcttaacatctaacgtaatcgagtgtgtcggaatagtatttatgaaaactgtgagatatcccactgaaaatgatttatgttgtcaaaagcatcgttaatacacttaagaattacgcatttcctcgtgtgccttattcgcaataattctactgtgttgctcacactaatgctaacaagtacggaatcctaacttaggtgacctagcgtaatactagcttcatttaccagttgttgtaatgcgtgcattgattttctttcatacattcttgcaagtaaatttccaagtaatttgaggatttatttattaaattatttctcaaagctgcgagagcttttggattcattcgaacagaattcatatgtccattatatccatacaactcgtactcaacaccacttcacacatctgagtggaaagttgtttattattttccaaaaatggcccttttatccgaagaactttctaggtaaacttatatttttttctcaaattcactaacaacgccgcagtatacttccaaatcctgatttcgacgatgaagaggaagattatgtggagagggaaacatcacatgcagatgaaagacaaattggtgtcaaatttcacattcctccctatggacaaagaaagggatggtttccttcttcacctgaagactttggcgatggtggagcttttcccgaaatccatgtagcacaatatcctttggatatgggcagaaaaaggtcagctaaatctgctggtaatacattggctctacaggtcacttcttcgggcgctgttgactataatgccattgctcgacaaggtcacgaacatggagagttggtacaggcaagctttcgagatttgatccccttacgtgcacgactaggtgtgggagaaatttcgttagagaaaccgtctgacgagcaaaagcaagaagtagcgaataaaactaagcttgccttacaaaaaatactttccaaacaaatcgctcagtctcaacctaaaagtgctgtggtacaacaacgtgacgatcctgtatacattcgatatactcctagcaatcaaatgggacaagcacttagcaaacagaggattatcaaaatggtcacagctgaacaggatcccatggaaccaccaaaattccgtcacaaaaaggttcctcgtggaccaccttctcctcctcctcccgtcttgcattctcctccacgaaaagtttctgctcaagaacaacaagattggcaaatacctccgagtatttctaattggaaaaatccgaaaggctacactattccattggataagcggctggccgctgatggtcgtggtcttaatgatgttgaaatcaacgatggatttgccaaattttctgaagcattgtacacggtggagcgtcaagctcgtgaagaggtccgatatcgtgccataatgcgccaaaagatggctgaaaaggaaaagcaggaaaaggagcaacgtttatttatgcttgctcaaaaagcaagggaagatcgtatgggtagaaatgcggcttcttcgggtccttcacatgcaaaaccccgctctacttctgtctcctctgaagaaagaagtcgttccagagctggatcgttctcgcatcattcagagtcagaaaatgaagatgaggattcagaagcttttcgccgtcgtcaagaacttcgccgcgagcgaagacgccaagctgaaaaggatcttcgtctcagtcgaatgggtgctgaaaaacgtgctaagcttgctgaaaaagatcgacctcgtgatgtcgctgaaagggttgctttaggactttcaaaaccatcaatgtcaagcgatacaatgatcgatagtagattatttaatcaggcttctggcttaggatccggatttcaagacgaagacagttacaatgtgtatgataaaccgtggcgggcggcaccttcatcaacgttatatagaccgggtgctactttgtcccgtcaagttgatgcatctgcagaattggaacgtattactagtgaaagtcgttatgatgtactaggaaatgcgcataaaaagttcaaaggatcggatgaagtcgtagaggtatgtttcaatatcttatacttttacttaaatactaacttttcttagtctcgtgctggccccgtcactttcgagaaagatattgctgatccttttggtgtagatacttttttgaataatgtttcttcaaagaaaacttaattctattcgatccttgacactgtcaaagaaaatgtacattattgtatggttttattcattggaatatgactgtcttaaaaataaaaaaaagtacaatttacgttttgtgttttttttggatcaaggcagttaattcaacagaagttcatatttagtcttaaaaattaatgtttattcttctaatgattaaagagctagtaaatttgagcatcgtttttatttgtattcttgtttcaactctggtaaaccaggattatgaaagtattttggtacaagatgtgaaaaagaattaaaagtcttctatgtagataatttaatttgtatatttaaaaatttttgatgaggcatatttatttatttatctgtgctttttatcactggacattcggttgtttgtttatatttcgctgataaacgctgtttgaaacaaacctgaacctactaaagagcaaaatacagatagttcgagaaataaatttttacgatgtctttgactgaaaaccttcaattattattaaatttggatagtctaccatccaaaaggtatgttatcgttacaatctagtcataaattcataaatcattcattaacaaatataccacagagaaaatttaataaaaagaaaagaatgtggtttaacaatcatgctttgcggagcctcaggtactggaaaaacaacgttcttcaatactctttttgctacttctttgcaaccagaaaaatcatatgaaacggctaaggagaccatagccaaaaagaccttagaagttaaaaagaataaggccgtaattgaagaagatggttttcatatcaatcttacggtgctcgacaccccagggttcggtgatttcattgacaataccagttgctggaatacggttgcagaatatttagacgaacaacacgaaaggtatctaattcatgatcaaaactctctccgtgtaccaaggaaagacactagagtccacgtttgtctctactttattacgccagtttcgtttggaatgcttcctttagatgtgttagctatgaaggagctatcgacccatgtaaaccttgtgccagtaatagcaaaggcagatacatttacaactcccgaattaacacaaataaagcaaaaaattagaaggatcctggaagctcaatcaatcgacgttttccatccatcaacagagtattctgattacgaaactgccgaattactagattcatccttaccttacgctatcatttccagtgtaaatgaagtttgcaaagacgatggggaaaaatcgcaagggcgtcgttacccatggggaacctctgaaatatatgaagaaacacattgtgattttttaaaattgaagaaattgctaattaataggcatatgctcgagcttataaatacaactgaaaccaacatctatgaacgatatcgtagagagcagcttacgaatcgaaagagtggcattcctaagctgaaaaaagagcattacgaacgcttgaacaatgagaaacgtgcgattcaacaaaagataacacaaatgactaatgaaactgaaagcttctttcaggccaaagaagagaaaatgattgaaactcgagatgctttgaattcggaactttctgaatatcacgaaaggatccgtgctttggagacccaaattgaaagtttgaaaagttacaagggccgcggtcataaaaaatgaaatactgtatatttcaagtctcaagtcaaacttttaacttttccatctccttttatttgctcatctgatggctttttcttactaaatttgcaattacaagaatacaaaagtaagttagacttatcctctaacaatttgagaagtctttgtttcataatatactttgcattggcaactttacgggatttgccgtaagcaacaatattcccgtggcggaagaatgaaaacccataatactttgttaaatggagttcagtatttaacaatgttttgtgactggatttcacctcctcgatgacacactttgttccgaagtcttcacatccctgatctttcagtaattggtataccttgtgttcaatatctcctttagccttagtatgtgtcgcatcccctaacgaattaagaaaaagaggtaaaacgaattgtagagattgtaaactaaacccagaatccaaaaaaatggcacatatcatagcttctaaagtatctgaaatgaactttggtgaatcaatttcaaaccagaaccacggattctctgaagcagtctccctgaacgcttcaattaattcttgatattcaaatattgcatcacacattgctgcgctttcatgttggatatatttgtgcaaattcaaaacaaagccaatgtatgatagactcttgttacacacataaaaagatttgtaatcagttaattcgccagaagttgcgttaggatactttttataaaggtattgtacgataatgtaatccaatacagcatcacccaaaaactccaactgttgatagttttcgtaaataccttgctgagacatcatggaaggatgaataaatgccaaatggagtagtttcttgtttttaaatgaatatccaatagtttcctctatatacgaggagtaagggaattgaacatttctcagtgaatccgcatatgtatttaaatcaaaataattgttccactcatcccaattgctgatatccagcagaccaacgcttaaagatttacagatcttgagtgctgagtcaagtccactgtctaaaagacatgcaccgatactagcttcgaccatatctgctatcctcttaaccgataatttctgtaaaacggcgtagcggcacttatccgatgtgcttttctgaaaaccatatggacaccaatgacggatttccaagggagtcgagagagcatacttcggcaactcacaatctattgctactttatacaaattacagttgctaataattttctttcgattaaaatgcagttggtactcttgagtatcaggaaatttcaaaaaaactgtaatagaagcacccaattttagaaagcagtctccgtaaaactctagacgatcgtaatcaaaattcaattgtgattccgcagatgttaaagcctgacaagcagtgtcaattttacaatcaagtcgaaagtgttcgataaaagaagaggcgaccaataagttttcaatatggtacagtatggagggtattagcaaggcgctgtttttcaaatgtctagagactgggagaatatagaggtcattgatataaaaactgcgcacttgctgtgatttgggaatggatttagctctattgccccaaagtgaataatttaatcgtaaaggaagtttcttacataaggcagaaggggccttatctttctttttagcaggaatcataaattcagaattgacaaatccctcaaaagcatactgttcatatattgactgtggatttactaataatacagtatcggattgcaaatcagtaacattttgaacaggttccggtaatttaaaaaaattttggatagtgtcaacatctatcagattttctaagaaccggtaatccgtgcatgacaaatttaaaggcgcaagccagtaaggagtaggtatttgttgctcaagagaagtagataaaccgaattgaagtagataacgagttgatttttttaacaactcaagcagatgagaatcgatcttaaaactatcctcaatcgtttctaaaacaattttaactcgggggccaacagtcgaattaagaataaagctatcaattttggggaatgaatgagcttgtacaaacactaagggatggaatatatgattgtctccttcattagcatcagtataaagtaaagagacgaagcaacgtgtaatatcttcaggaactttcatccaactttttggtacatagcgctcatatgtctcgatataaccttcatcttttagctcgtcttcctcaagagtttcaaggtcggcaatttttcttctaaaatctaggggttttaaatgtttgtctataagacccatacgaatcagatccaaacacatgatgaacgcagcattctgtttggctttcctaattgatttagcgggagatccttgagccgctggaactttgcaggcttttggcaattctacctcaaaacaataccaacctgaaagacagggttgagctgtaaaagtgggataatatcttgtgtatacgtctcttgaaagtgtgttacaaaagttataaagcagactaactgcatacaaccctgtgagtaaagcaccagtctcgccaacttcatagacgatatcatcagtcacacgttctctttcctcacataccaatgaatcaaaaatattcgaattgctgagctctgaaagggcaaatttaagatttttttcttcgtgtagaatgcgttcatgaattaacaactcttctgtgtttaaaaaaattagaaactttgaagccattgctctcgctctacctcgagattggacatactgggtgacagtccgacaaatattgaagcgtataactaagttacatgatggtacatcgataccttcttctgcaactgcagtagcaattaaaacattatattttccagtcttaaacttatgaagggtatctttttgcctcctgaatgtcatagaaaattcaccctgatcggacggtccatgtcctataaaagaatgagcgcggatgttaggcagattaagagttttcataaacaaacttaaagtaaacgccgtagcttttctttcaacgaaaataaccgtacgaacgctatcacttttgcggtaagtagcctttaacaattctaagagtttaaagactttatcagtaacatcagtggaatcaaaaacagggattctagggccattgtctgaatatttgttatttttccaatcttcaacaaatatttttaaccggtcaattgccagttcctcgtcatctgacaactgcttccctaaagcctttttttttaatcttttcgtttccacaaaatcaaccaaatataaccaaacttgctccccaaaccaaagacccatatctatggtttctgctaaagcagtcttaacagcccgagaaattaacttgcatccttgaagagtttcctcgcatttcttgataatagaatccgagggtggcacaaccaacttattggaatacattacatagctttcttcgggaagacagaagtaatcggctagctcgttttccgaaaccacgtgtgctttagaatcaaataattgctcccattgatacagtcgatggtataagtttcctttttttccagtgaatggtgaagcagtcataccaaaaattcttggtagggtgaaatgtttttttgacaatactgctttggctctgtgataaaaatcattcatgatgcgagcatacgcatcatttccaattgcatgatgacattcgtcgaatataattaaattcaaatcatttattgaaagaaaacctcttgcaagaaacaaatagaacaaatctgcagtaataacaatcacattatacttcaatataatattagtcaacaactgctcgctcatttctatagataattcgccataaaacatgccaaccttagccggtagttgagatcgaatgtattccgcttgttgaaataccaaagggactttgttgacgagaaaaactgatatttttttatgttcaagatttgattcttggattaaaatttgctcctcgagcttttgttttatcaacttcacagcaagtaatgtcttaccagcgcccgttctcataacaagtaaagtattttgcttgctcgcgatattatacacatcttgttgatatttacgtaaaagttgaggaagtagaaaacttgaaatatccattcaaaaagaaaataaaggcggaaggtttcattcaattgacgagaaatttgtctcttaaaaaataatgaatcctaagctattcaaataaacatgcatatgttcatctttaccagaagaaaaagaacaatcacacgagcagaatacttcctataattgtttgtgagattgataaaaacagacgcaatactattgatagcttctaaattcgttgttaaggggaatcattacacttatagattctggtgttttaagagaaaagtaggtggtagttttttacaacataagttacgcactttaataaaaaatgattaaacgcctatgctttattttaaaatgtttaaaaaaaaaaaaaaaaaaaaaaggaaaattgcatatacatattattattaaatcaatattattgaatgaagaaaggactgtacgacttgcttgtaaatccgtgaaattcagttacgttgaattactggtttccaatgctttatgctagaatgattcggttttttaagaattatttacataatattttaataataaatacatacatatatatctgtttacgcgttcactgcctgctcttatcggaacataggaaaacttattaaaaaaatattagaaaacattaaacatacaatacttttttattataaagtggtaaaagcgaaattatcaataatagaaaaactgctttcgtagaaaaccaatacaacatttacaatgaattagttttttaaataaaatagaagttgagaagttgctaattagtatccacttaatgatgaaaacaatattatttgaagtctctaaaatgaaaagtattcaaatttttaaaaaattttaaaacattctcgctcgtttacacagactgcagtctttcaataaacataagcgaatgcacaattttgccagatgccttgcccatgtccatcagtataggtattaggatgacaagatcgatttagtacacaaacaagagaacgaatgaatttcagagcttgtagcacaagaccattaacaagaatcatattcaatatgagagcagcacaactatcaagttcagagtataagtgataagtctatatgaagttattttaataaaacgaaaaatagtatgaaaaaaaaattcgaagacacgaaattaaaaacaacaggacaaaaaaaaggaaaaaaagaatacaaaaccagagagtttaatatagaaaagctctgaaaaaaagatggatgcacgttcactctttgtttaagcccaaaatgcatcgaattatttatgcttgaatatttttgttaaaagatgcttatgaaataaaagtagtctcattaaaaagcgtggcttcatcttcaataacctcgtcacccatcttcagtgtaaatttgacaggtgagaaatattggtagatgaaaggtttcgttccagagactccatggacgaaacccttaagccaagatggtatctcggcaagaacgtcgatgcgttgaagacgtcttcccaaaggagcatcgactgaaagatgaatatcttcggtgtatgtttcagcatcctttccgtcccattcgtaggaaatgcgagtgggttcatgccattccgtatcgggatcgagtgtggtctcaacgtgctcaatagtattatcgacagttgcactaataattttgtctttcatagcgataccaccaatattgacaatagtagaaccatagctagggggtgtcttgaactgcatcatgatggcggtaaactttttatgctgcaagagggcaaactcccaagatgaagcaagatggtggggtttgccattttggagtgcatgaacaaacatgccgggaccagtgacatccacaactctaccccttgcaacgatgctaccttcaacacgagtgcgaggccaaaaggtatgcttcatggaagcccagggcttactaggatctgttccataagtagaatttccatcttcaccgattttaaaaggaggagcgtcttgatggacagttatatcgatgatggagtccatgttgatggaggcacgaattcggtaacgcttttggtcttccaacacgacagagcaatttttggcgacaaaggaggttttgtcattttcaaagctaaattgatccatgttggtagaagtccacaaatcgttttcaggatgcttcaaatcgaaaatgcgacacgtagattgagcggtggttgtccaagaacccaagttggaatgtatcaattgaacaaagcacatatagtcaccctcatttggcttgatataaaagacttgcgtttccacatggctggaagagggagtgctccatttgaagtcgtcggcttcaagcctatggaaaggattaatgccctgaacggatgcagtgacgggttggatagcctcaggaccataaacgggttccgctgtgccagtatagtaggatatgctaaaatcgagttagaaataataaaaaacagtaaaaacaagttattagaatagacaactgaatgttttgtaagacaacacgaaaaaaatggattcaaatagcagatgtctgatagatgaaaaaaacggaaaagaaaaaagaattttgttttttgctcatcgaatttaaaaaaaaatttttaagacaaaaaaaataatcgaaaacatgaaggaaatgtcagtgaatacatatcgatatccaattattagtcgattatattaccgtttttattcataggacaaacactcgatccgtttttaggggtccatatttttacaacctctaatcaagccaaagagtaccaaaaattgaacatacacattgtaaatcactgtataaatccattcttttgcgtttgaattacaaatcctcgctgaaacgaagaaaaaagcactcggcagcgatcgaatccaaatgtccagttgtacttacctagattgtagccaggccttcatgattaattaaaatgaaaaatgagaaaatgaaaaagctaggaacacacaaagcaaaagataggcgaccagcaaacggagagaggacacgttaatggcctaaaaaataggacaaagaaaatgttggtaaaggataactaagatgagctgggaaaacaaaagcacttagtgcaattcgttacggaaccgaagcagccaaaaaaatggaatgatgattgtttagtgattgacgtaatgcaaaacgctataatacttttatgagatacaacgtataagaaggtggttttagcattgtcttgggttcctcatcattccgtatgctcccgttgtcgtagtggaacataatttctgttaaacattattacgcatagaaaaattaaataccttattaaataattgtgtactatttcataggttttgttgtatgagaataaagctttcggtggttgaagatcgataatgatctaataacgaaaatttttaaagtgtagaacatacatgttaaagcatatagcggaatactttattttatttacagagcggacaaatgttaatttcggaaaactgcctagatagtagcaggccgacgctagacatataccggggaactatggaaaatcacaattaaacattgttccaccttacgtatacagaagaaagttcgaagaatttatgtaagtttcactttgtttaagtaatgatttgtaaaaaacatcaagctttccgttttccaacgacgtttggtatcggcgtgtgacatagcgagagtgtaaacagagatggataaacgagtaattatctgcgcagaaaagcacgattctcttgtttattagtgctgaagagacccacattctgtggatctacacattcaatatcagacccttagcctgaatgaatccaggtatggcactgtcttaacgaattagctcccattcatcctacacgcttccgttgggctggaaattgcctcgtagggtgcagacgcccatgaaaatttacctgccgtacacgaaatattgaagttgaccatggtgatgttgcccgagacgaaaattgatgttttatttacatcggcacgagattagatagctggcaaagaagatgcggctgttttatctaagtcaaataatataactatatacacgtataaagtgatacacgatataaatataataatatagaagaaaactatgttaacgtagtacttaattgtaattagtaaatcgcaacgtttcatttattgtttacaagcaaaagaccaagtgatttccatggaaatagcacatcgagagaaaaaccaataaaagtattttgcaaataaaataaaaaatgatgaagtatttatgttatagcttttcagagaagagaagaaaagagaatgaactgctaagtaggatatagcaaacaacacgagtatttttaccatctcatttccatacaaaaataccatgtcaatgtcgataaaacgagagctgtaaactcttttatttcatcatctctaaacactggcattcttccactttatttccttctttcgctttgccttttccaatgctaaggtacatgttacctaaacagttgtttacatagtatacttttggatgggtattttaataggtacttttccaccacgaagaagaccaactctccatgaaacggaaaatcatgtaaagaaaaagaattggagatgcggtaaaggtattaaatgttttttcaaacctagtgatcaagtttatttagttggccaagttgattgtcggtttttactccaccacaatgcgaaaaacaaacaatttcccctaatatttgttactaattttataaccagcttgcccaattttcagtttcctctgttctttttcgtgtctttgctgcatttgtataggcgaccacgaaatcagatatcgacgcgtaaatatactccccatacgcagtcaggcaggcgttaaacattgccttttgtaattgtcattattctgctcaatcaaatttcaatcgcacaatcaatttctctaaaaacaacaaaacttgtggaaagtgaatagaagttattgagtccttccattgaaagcgtttagagtcaaccctaaaatcgctttaattttgcttctgcgccgatttttacatagactatctgctttctatactacctatgcctttggcggcttgccctcgacagtcgcatttcaatttcggccaacgatttttgaccgcttcgttaattggtattatagcttcgcttatgcttcggtactggtcaattcgaaaagaaagtacatttgacgttgctttctcatttatatttttttacaggtgttaaaattcaagagcagttgcttcattaaatgcgttttctttacgatattgtaagattttggtccaaccaccgattccttatgagacacacttgtttttaacgaggttttgtcctaattgccctacgctagatttaactgcgcggtatctaggcaaacttgcttggccgtgacattgagctagtatgatgatattcgacccttttatattgactgagcttaaatggtacgccgtgataacttgactacaaaatatacttagttccattatcggtcgttccttatcggcacacaaacaagggtatcagaaaagcaatccgtattacaattataaaagtaaggccttccctctaaaaagtcaaaagttttggattttacatctagggcttaaacgagtttgtaccaaattggttatctgcaactttaaagtggacattctgcgttgaactttgctagcactactgctttagagattattgacatcctacagtcgtttgccatttaattaaaaaaaaaaagggaattcgcaagtcttcttggaactctgtaaatcatcttttttgactgtccagttcgttggtgactttgttactttcattggattgctatatcaacaaaaaaaaaataaaactgatctgttcctcctctttgcccctttctttttttttggtttactcgattatttattcaggtatagccatcattttcactgctattaactacccttctatcatttggttgtgaatagttttttgtttaaagttttttactgaaatcatccctttaaaattttttttgagtcattaatctattccactatatattaattttgagaattgccaaatttggttagctttttcttgttaattcttctccaatgtctattttcaaaaaatcttcaaatacggcaccttctcaacatgaggatgttgaagctctcgcatcagacgaggccgatttagccgcactgggttataaacaagagttcaaacgtgaattttccgcgtggacctctttctgtgtttccttctctgttcttggtttgcttccttctttcgcctctacgatgtattacactactggttatgcaggtacgcctgcgatggtatggggatggttgattgccatggtattcgttcagtgtgtcgctaacggtatggctgaactatgttcctcaatgcctacttctggtggtctgtactacgctgcagccgtattggcccctaaaggttggggtccatttgccgcttggctcactggatggtcaaattacttggttcaagttacaggacctccaagtgtagcctactcatttgcgggaatgatcctaactcttgttcaacttcacaatcctaattttgaaacgcaaaattatcaaatttttttacttgccgtagctgccatgattgctcaggggtttatctcttccatgccaactaaagtattggccgtctttaacacttggggaaccgttttaaatatgttattcttggctattgtaatgatcactgttcttgccgttgctggcacaaaaactcctcgtggctttaacagtaatcacaaagtctggaatgagtttgataaccaaacggattggagcaacggtatggctatgttgatgtcatttgctggtgtaatttggaccatgtctggttatgactcaccttttcatttaagtgaagaatgttccaatgcaagtgtggctgctccccgtgccatagtaatgacttctgcttttggaggtattgtcggatggttgttgaacctttgcattgcatacaccattgttgatgttaatgcagctatgaatgatgatttaggccagccattcgtcgtctacttaagacaagtttgcaactacaaaaccactgtagctctcacatctcttacagttatctgcagttttatgatgggccagggatgtatggttgcagcatctcgtgttacatattcatacgctagagacggcgtatttcccttttccaaatatcttgccattgttgacaagcgcaccaaaactcccaatgtttgtgtttggatgaatgttgtagtaggaatactatgctgcttacttatttttgctggtgaggcagctatcaatgctattttttcagtcggcgccatcgctgcttttgttgcgttcactacccccattttcctccgtgtgtttttcgtcaaagaagacgaatttaaacgtggtccttggcatttgggaaaattctctaaaatcaatggttatgctgcttgtgcttttgttttgttaatggtccctattctctgcttcccacaatttagaggtaaagataatactcctgatgcgatgaattggacttgtgttgtatttggaggacccatgcttatggtccttatttggtggtttgtatctgctcgtaagtggtttaaaggaccacgtcttacaattggcgttgacgatgctgtctcagaaatcaatgttcttgaaggagtcactaaatctgatgacgattcgatttcgactttgaagaaaaagtaaatgaccatcaaaatttggctggatgtttttatcactttaatttatttctttccctgtaagtttaatcacctttctactccaggtttcatttctagtgtttcttgacccttactattactgattcatttcccttttgaattccatctattgctttcctaatttccgtctcttttacccttcaatcctttcctaactcctacatcgtcattccattgtattttaaatattcctttgtcatcataccaagaaattttgttagttttgttgttgataacaattaaataatatgttatgtttgcatacatttatttttagtttcactaatattttttaaatttactagctgttaaatcctgagcgaaacttcaatctttggtcattatagtgaatatgataatttttacagtaatacttaacaactcgacggaaatatttgacttgttataagtattattagagattaagagctttaattagtgctgaaggttataatgtaaattgacaacttaagtcaattttcttatcctacgtagcagtaagaatacagcagactaagtaattcgtttttgttccagtctaattatgactgaaaaagattgtcgtttttaaaaagtctgtttttatagtattcgcttatgattccaaccatattgcgacacatactatgtacatatgagtctatttacttacagacatttctgtatggaaacagctcttgttttaaatactcataagttactctatcaacaattcgtaccttcaaataatttgggaaggcttatccattaaaaaaaaaagaactattttttatttaccttaagccttcattgcttctgtgtgttatcgtctaatgaaaacagctattggtttaaaactgagttcaaaataggtagatatggagaaaatggaatcaactgaagaatgggaagcactattatcatcatccagcaacggtgatgagctgacgatgaagcttataagaaacggccttgcaaaggggtttaagtctcaaaaagctgctggagatgccggtctttatagtcggtttttaccttatcacttcactgagtcggtttcaaatgatagtttttcctcattgccatggcaaatttttgcaaattctgttgctggcaattcgcctctgcaaaatgaagcatgggcttttttaatggataatgaggattttttccttcctgttcccatgaatcctgctcagtgcactgcgcttgaaatagctctatggtcgctcataagagtggatgatcagcgacttttcgaactttgtcattcgaaatctggtatacgattgctgagtatcattttcgattttgactcacatccggactggcttcgggaagatgtaatgttcaatattgctgaaagaattctaaagtccaacttccctaatgttctagtaaatgttgcttctaaaattgggcctaaatctatttatttcttgatcgactgcatgagtcataaaattaagctaaaagaaaccgctacaggattttatgttattttagatgtactctcttgtgttggacgccaattcgcgtctgtgttagaagaatgttttaccaaagaaatctcgtctgccgggcttgaccatattaatcatttctctgaaattgttatgttaggtgtcgatttattgtacagagactatgtttcttatgatacaactatatctttaaagaacgatgattcaagttcgctgggtgatatggaatttgaaacgagtcaaccgtcttcttcgatcagcgaaataattcatttgcttgccgtacttgacaaaagaattcccaaaaagacccttgttgaaaaaacatatgcttcctctatggagttacaagaactctacaatgctgttgtaggtgtaaagcgagaatgcgttagatttatcgcttttatttgttccaaatttagtactgcacctgacttggtccgccatttcaatggtgttgctttaattatttctcaagcaaattatgatgattggaatccgtatatccgcgaaatctcagtactctgtactcgtttacttcttcaaaataatatagaaaatcaaaagattatagggggtttaactccaattacaactacacattctgatgcattagaagaggcaggtttcacatcatatatcaacgacaaaggaaaggtagttttgcaaccaaagacagcaaaaaactctcattaatgaatctgttttatcgagtttatgaacaccttttttagttctttatttactgatgccccaaaaattcaaatcatcaaatctcattaacaaaaggttagcgcaaggttaccaaatctgtcaattcttcattttagctggttcaataacaattatagtaatactttgactcgactttgtgaatatttatttattaacttgattcggtataagtaatttaaatatcattaaatatcgtatataagctgcacaactttttcaaaacttttcataccaaattcgctaataatttgtatgcttgacatgctgtaatcataatttttcatgctttttcagattatatatttcggtaagataatttcaatgttagcaaataatatgcaattgaaaacatagaatgcgaactttgagtgtttttggattcaattcagacaatccatattttggaaaaaaaggcgtcacgcattttcacaaacagaaagatcaatgcttaaaacaaacatgcttgtaacccaatttacttttaaaatcattaaaattaatgatcttagatcatagggaatgaaaataaaccactttaacagacgctcatcgaactccccttcgaacgagatttgtagaagaaagacttttcctagttgccataggatgggaaggaagcggaggcgcaggagttgaaggaagcgctggtgcgatgatagtgggtacaggagatggcgctatagtcgtcgtattactaggaatctcgacagactcagtaggacttgaaggtcttgtagcttcttcataacggggaagcccatcaagcggcaagacattagtaaacgcactgtgagcttcgtagtacggaggaattttgctcaattcctgtacattaagggtacatgcgctacgtacacgaggtaacctcgaattactgctggttggagaaggaagtggtgaaagcaaatccgtttgtaatggttgcaactgagaattgaaaacagaagaggcactgttagctctcgtcctagcggctctccgcgtaactcctgaaaaaggtgctaatggagaagttattggcgacatcatatctgtctgctcactagacatagactgtggagagcttccaaagaaaaaattggcattggaatttgaagcgggagaagacggttgttgtccagaaataggaactggattagaatgaatattcactggactgtttggaccgaaatcggaagaattcctacgacttaagttaggagtagtaaacccgctttgcaactgtggattttccgagggtatgccatcccacaatacatcaaatacatgcttgtcgtaacttggaagaatattttcattcacataggaattgtgatcaccagtgaatactccttcagtgggtcgagcaccaaacatcactggggatataacaagacttaaaggtaaagaattccgtagttctgatacatggccatcagggttcaataacgaaatggacaaccttagtttgtgatggactcggatacaatttaggtcacagtcttgagtacattcgccaagggaatctggaatctttaccataatttggtcttgccaataatcatccaccattggtaatcccggaatggtcttctttactaatgcacgcttaaactcctttctacatgtagaagaataggccttggaagtaataaaaagcgtacagtattctttaagaactaaagtcacttttcctacatcaaggccttttaataaaggatacaaagtaatgttaacaggtatttctgagccaattgcatacaccttagatggaatacttgtttcataattaactttaaggggccaaatatcacttacgctgactgaatgcataagatcaagactatttggaggaatagtcctaataacacgaaactgcagagcagtttctaaattggtaggaggctgagttgcccgctccaaagaagcagtgagtgtatagataatatgacatcctggaattccttcaattgaatcaggaatatctggagggagctcgtaataaaaaggatactcgtagtttccttggtcaattactttagctgactcgttgggagcaaggaaagaccagcttttatccagaatttgtacaacttgacgtcgaattctgttaccaggcgatgcatgacgggactcatcagcccaactataaaaaaagtgttagccctaagtgaggttaagttattaatgggagttttaaaccataccaaacgaaagaacggccacttagccgtaatttaatattctttacccgaatgggggaagatacagaaagaactacgatacctgataatcgtgccgatgtgtccatcgagtttccatatagcacaatcacattagcctctgcattgtaaagcctacaaacgagaagttagccagtctgatgcgtatatatataacaagaaatatttaagataaataaatgtgtcaaaagtaaatcaaacgcagtatatagaaaactgaagcttaaaatgtttacaaaacaaagatggggaaatttaaaaaaaaaatgtagggaaataagtagaaaacttagaaaaagtattaaaaaagatggaataaagacagcgctttgtaaagaaaaaaaaattttctaaaaagcgcctacccgtccaattccttcggccattccgaaaaatgccgattttcagaaacaatcaaatagcaaactattgaacgagcaaattgaatcaatttcagatgttatactaacttgatggctaactaaaagcttttttcaacatccgaagacttaaaacctaaacattaattcgaaaaatccccaaacactatttcgtaaacggaaacaaagcaattataaagatgttgcagagagattaaccactatcctggcctctcaaatcttgatataaacacgaaaaagagtgatttcttaccgaacttcaaagagctttacggggcttttgtgccggccacctttaatcttattcattcataataagttctggtgctgtaccagattttgtatctctgaatatctacgaacagatttgaatccaaaaaatcggaaggaatgtagcaattttcaaccaaaacggttgcgggactgaatagggtggatggtgtaaacaattaagtactttaaaggtatatatgaaagcctttgtcatacacaacgatagccgttaagcctcgttaccagccttcagtggtcggcgggttgccagtgcattaaatctcataatatgaatacctcaaatttttggtggaagtatgggttaaggtcttttagtgtttttattaattacattttcatgaacagaaggagtgcttcctcgatattggaggaacatattgaacgttccgatttgtaaacatttccttgatatgattataccttgatgtatgtacgaccacatcgttactttttatactaatattaatatgtgaatgaaagacttatattgttatcggtaagctaccatcgaaagaggctcaaatgttagtacaatgcatcaaatgggaataaatatagagttgcatccccctaccctttttggaactgttaaattatcgctacaattctgtactaaaataacgagagctatgtacgactattaacatttggtcgaattatattgttagggcacataggaattacttataatattgaaaaggtgattttaaaatctataagattatattaaattttttaatctaaaattcaaaaaaataaacagatgagaaacagctattcagttggataaaatgttatgcttcattaaaattaagaaaataaacagcagctataacaaataaaaaattgtcacgatagtagacacggtcggtatcgtgtaaaccagtcggaaaggaagaaaattttggtaatttatgaagggcaatgcgggcaacaaaacgactcatgagtagcttttttaaaaacgatggaacgttttatttttttcggtctataagtactttgctactgggatttttaggacatctttggggtatcaaaagtaaaaggtgtggacggagaaaagcttcaatttctagacagcagtgaaaggtttcatgaaggaaatagattggcaataaatatatatgaaattgagaataaaatgcgtaataagcacatctttaatgacgcgaaaatcatcaaaaggaaaatgcatgtcaatccaatagaacaaaaataaaaatagtcccaagaatttataaataacaaaaaagaaaaagaacgccattattattatttattaagaaaaagcataaagataaggaataagcagaagttccgcacgaatacacattaattcacggttttggaaaataattgggcaataaatttagtagggatagttgaacgcatagagaagttgacaaaataaccatttcaagttcacgatgagtaatgatgcggttactcagacccacacttcccccttcaaattgtaaggaacgagacgttaaggatgctaaaaagtaggattttttaacatcttgaatatgcaaataacacttccaagtttcattaagttttgccttgtcaggagcaacccacttaattcgtaaactgttttcgatactaaacgatgccagcatgtcaaacacccattcgttttttgtacaagatattgtccaaggtaaataatccttgatatggggactataaattttaataacgacttgactcgatccaacgtgtcttttacaaaagacagcagaagtcttatttgattcagaggaaacattatccaacaccaagttgtgcgacaaagtatggacggaaaaacgagagtataagttaaaaacgggctcagctgtgattccctgtcgttttacttgaacgacaaggctgtttaatttaggtcgtagaaatcccaatggtggtgcatgtggaaacgcgagaaggaaagatggcaattctggcattggaggtgtttgtcttttccttgagcttcttttacttgcaggagaggaagaaccactggaacttgatgaagaagccattatgatagagagttaattatgaagaaaattgtgaagagaaaaaaataaaataaaatagaataaaataaaatagagtaagaataaatatatttaagggactcctctttgtctattagtaaggatttaagggcgagacgactaagagaacgaaaagtggtaaaaacaatagcgatatccgtgaaaagaaattctacccactataaaatctccctttctataccagaactattgcaaccaatttgctattgccacagcaattggggaattataatattaaaaacaaaaacccgaaagctgagtgaaacagcaaacaatgaaacaacgaaataaaatctttcaagtgtctaaacaacacttcacatcgttcaagcaattcgccgacacccaaatatactgtagctcacgagttgtacagtgaatgaggaaactcttagtaaataaatcgttaaattatacaaataaaagaagggtgttttctcgtcagccaagcaagagcccttatactttttgtcttaatatatacaacacactaagataaacgttacgcttaaatctctcaagtagttgaatcgacttcagctacttgtcattcaactatctcaggaagttgcgtttgggaataagtagaggcgttcattcttcaggtatatatacaacgtctacgtattcaatcattttaaaaaattatactacctcggagtaaattatttcaaagcgtccgaggcgtagacgtcggagttgaacaaaccgataaaatcttgaagataaccccgaagtccgaatgctctgatctattccatgtgcgcctctagcattcgatattgttgaaagttgatgtgaatagagtgttatatcgcacgcttcatctgatcacctaatgccatggttagaagatctcgttatgctgacaaaacatggtggtagtattccactgcactatagctaagatggtaggatctcgatagtagttataaagaagaaatgagaatgttctaaactgcatatgtaatcgtccacgttttgccttgaattaataatttgcatctcaagaaactcaagtcaggcttggtacagtgaagtgggtgattgcaatcatcaaggctattaatgctgggctgaatatagtacaatacatttaatacattatacattcaatacattcatacaaacgatacttacggcattttgcacaacctaatgtgtaaataaacctgaaaaggttttaaatgagtttgatttgacatctccttctataagctctagtaaacttcgatgacaaaacgacgctcttccttccattgttcaatgatcttgcgagcatcgactggctcatcataactgctctggatcacttcctctaaaacactggtgatctcgggcaagggccatgtaggaccacacaagtaaaaggaacccccctcatccataagagccttctttaacatgtctttggtagatcgcataacatcttggatatagattttgtagggttgatcacgactgaaagcttgtccaatatgcgtcaatagattggcggaatgataagcctcccaatcctcaccatacagatactcttctctttgagtacgggaacccaaatataacaagatgtcaccagattcgattccctgcatacgttgccattctttgaattgcaaaaaggcacggaatggtgctaaaccagttcccaaacctgccatgacaattggcttcaagggggacgtgggcaacttcatgacagaagtcttgacagcaacgcaaagaggttcgcccaccttcaaattggaaagatagtgcgagcattggccatagcgatcacgtcccataccatccttccaaccaaccacgacaaccagcaaatgaacactgtcattgtgcttcttttgagaagaagaaatggaatactcacgacgcttaatgactggtacgatttgtgcgatttgtgcagcagtcagcttagcatgcttaaactctttcaatacatcagcataggtaagcatatctacttcagcacgacgcttgaaatcaggagctccagcagggctaattaaaatctgcagatcggcacgctccttctcatcagtctcgaattcaagcagttgctcatggaattttttagtgggtttaccaaaaatgtcaatgttctgacaaagtgcttggaaaactgtgcgtgtttcccaatgaccaggatgttgaatggacgggacgtggataagctcgttagcatctaatccgtattcctcaatgaaatcatgaacgtgagttttattgttaacaccgtaaacacccaaagcttcaccaatgtcataggtgagcccactgtcgccaaggtcgaattcgatgtggaaaatattacggttatactcggcgggcgtaagacgtttgttagctctcacgtgaacagtaaagaccttctccgaaacgtcaggacgaagggcgtccttctttttgtaagcctcggggaagatgatctgcttggccactgtctgccagttggaagattgaggggtgatatcctcatctaaagtcttcacagcgttgggagcaaacgaagtttccttcgcggtacttggcaactccttctccgagggctcgcgatccttcaaagccgaggcgtctaaattaatgaacgagagagattgcttaagtgagtcaacagcatctttcaaattcgtgtcagttaaattattttgcttagccaaaacagccaaagcctcgtcaacacctaaaccaggcttgacgagttgaataaatgaaaccaacaaaggcaagttcgaggcatcgatggcaaactttttgggatcaataagcactaatttcactcctttctccaaagcatcagcgataaattcgtatggaagtttcttagttgcttcatctggtgcgatggaggactgtaataaacaaatagaatgttcagcagccttggcgagaacacgataatgtaaaggaagtcgatcagtagttaaaatagtaatatcagcatcaacatctttaacaacatctgttaaaacagcgttggccgtagaaacttgggcaacggtaaaacggacgccagccaaggtcaagttgtcaaacaaaggacggaaggcaacagatctcgatttatcggttctataggcagaaactaacgaaagcaccaaggaatcaccgacatcagattcccaaacgttgatgctcttatcaacatgaacagctttgggagtagcagctttcaattgcagggtctcgtgaagagcatcaaagagagagctcaaggtgacggactctactaaggagtagcgatgctcggaaatagcaagcgctgaaggtttagtgctcaacagtgtagcaagtaggaaggaatagtagatggaagaagttccgacagcggtagagcgaacctgggaaagaacaacaagagatttgcaagtagtgggaagaacattgaaaatgttttcagcaacaaaagggaagatacggatagaaagaacgcccacatcaggattggcagccaaaagggcgcgagcagcgacggtttcagacttcccaaaagttacaataaccttagaagcggtttgagatccgtaatactcggctggagcatacgaagtgttaaagtaatcgttgacatgcttcaaagccttggaagcgttggagacaggatcagcttcggattggtaagagttgaagcactcaaccacggcgttggaatcgagaagaggaaggctgggatcagttgtggtgacaatggcatccggctcatacacatgaatgacaggagcagccttggcagccaatgtactggccaaagcgaggtgagcagcctcgacattagattgcgaagcgaaaacggtgaagttgttggcgtaagaaaagtctaaaacactcacgttatcagcgcaataggtttgttcgaggtaggccaaagctgcgacatgaacaacaagaggcttactagctccatagaaaggaataatattagaaagcaaggggttcaaaagcgataaacagctggaaggtgtcatcatggagtagacaccaggagaagagattgctgcagtgtaagagcccaacaagaaagcggaagcgccagagcgagcctccaaattgaaaagttcaacattgttggaaaatccgtttctgcgaccagagttgttccactgagtcaaataacggttcaaaggaacgtgttccgcgtaagaaaagatacggttggaaagagaataaacaatatcttcaatgattttgtgcgaaacatcgaatttcgcaacttgatcggaagaatcagtagcaaccattttgaaccaacaaatcaatgattaaacggaagaaaataattaaagaaatttaaaattttgattaacaaaacgtttcaaaaaattaaataatatttaatgaaaaggaatgttgaaccccaaaaaagaaaccaaaaaatccaaatgtatggagaaaagtgtcaaaccaaaatttttcgttttgacgagctttccaaaaaaaaaaaaaaaaaagaaacaagtatgcttttattcgctaaaaagttagaaatctgtttcttaattaagatacagctttagattcaaaatttcgccaaaaaaattaaccgttaaacgttttaaaattttggtgtatttttttctagttaaactgtagatataaatgttcagttgcaaatgcctaaaattcctaccaaacgtggaatttacacctaagcaaagtactgggatatttaggtatacttggtaaagagtaaaattgagaatttaacaaataaataaaccagttcggagagctactgcttgcgtgattgcgcttgtgtatcacaccaattgttgctactttaaagcgacataatcgcttaatttaaaggtataaacaacgtattctttcaatagctcgttattcttattaaggataatggaggtgctttttcttactgtaattaaagaattgtttgatgtcagcaatactacactacgctataatacactacgttgcgtatcactatatgtcacatgttctaattatatatagtaccatgtatgatacgatattgagattgatcttaatgataatctatcaagatctatattatctgaataatataaatagagctactgctgaacctcgttcctcagttcagttataagctatattagtgataggtaacattataactcagttaatacaatacctatactcagttgctacttatacaacctgtgtattgtaatataatagatcacaaggaaaactcaccgcagttctacgtatccttaaatcagataccaaactgcgtagcttacatttgaagggatttaacaacataatggaatgtagttgacagatgtgacgttgtatatctttgaacaggtatacagagatttacggatacccagacgataaataacgaccgttggggttagcagttttattctcatcaaattaagaaaatgtgtgtgcaaggtagttattgtttttataaggttttctaaatttcaatacttttagtagtctcatcttgtagcaatctgatcagaaagacattatcatctttcgcattctgaaaaacatgaaatagaatgtcaagtgaatttgagtaaagaaccgcacgtattgatgtgttcgatttcagcaacgtacttgattttagaagctccattatatgattttagtttagctagttagttttatctccagaaaattgacaggtattcaatatttactgatttattcatagtgcgctaaatgcatctaagtactgtgctgtaattatgttcattatacccagtatatcagcatctagcagcaaatatacatttatgtaaatacatttacatttcaaatagtagcatctccaaatcgtcacaaattgtagaatttacatatctttttttaaaatactgaacgttccttaatttgatgaaatcacttcgtctacatttctattatgtgacaatatttgtaggtagcaaatattcaaattgattaaaagattttttgaaatcgaaaaaaattgtgagtttaatcatacctttctgaaagaaatatttcaattttttttaaaaaaatttgaagggtctgacaagcctacctcattttacatttactttcatttaattatttttttaaacctgacattaaaacaaagtaactcgatataaccctgaaaaataataatcaattaaaataaatgagcaatcaataaaaaagttattatgtctttaggttgcaaacttttaagctgttttgtaatctgaaaatcatatatgttataatataaagtagtatattaacaaaatccagtctttatagcatctggtaccttttgcaaacaaaagttatttaacaagtttagagtgcagaaaatcgcaaaactgcttagagaattgacgcaatcataaaaacatagaatgaaatcgcctcgaggaaaaatcacaatttgatcagtttgcacactcattaaatcaaaattatcttttctacgaaattgtgctcaaaaacattgaacatagtgatttaataccttcctattttgtatgttattgttggttagtgtcaataagttgatgtatttgtttatcccataatatgtaaacaaatgtccatagctagagcttataaataatttatgccagcactcaaacttttgacaaacaacaaacattggaaatatttaaaagtaaagtatattattttaaaacacttagctgttcgtcttgtcttctattaatatccgttgtgcaattcttctggatcagaaagctaaagcagagacgaggaaaaaggaatttgggaaaaagctgtcatttacaatttatcaacctaaaggaagagaacgtataagaggaatttatttaaaacgttcctcgactagcttatttactcgaatcctacttgtcttcttttcccttaatcacaaataccttcaatcatgatcattattgacggtaagaattatgcttggtaagactttttgtatggttataagataaaatttttaacacttactctagtgttgtatgccttcgaggtcatcgaggctcatcctgccagcatcaagaaagggcactgatagaagttcgaactagaggaaggccgttactatggtatgtcacattgatcagaaaaaaaatattaacttgaaattcagcaaaaaatgcagagccataaaacaacaacttaagagtaatttaaaatgcgtttgtcatttgcagccttttctacccttcgccaatgagtatcaggagttattaaatttcactcagaaaaacccaatattggctagcctttttttgttttcaaccgacaaagatattatgaattcttctttaaatcctgcaagtcaagcctacaccttcgatttaggaagaacactacccatcagtgaagatatattaggatataggaaacctctttcactaacagatgcttctaatcgcattgatgcaagtcaattgaatgaaaaagaaaacgattcttttaccataaaccaagaggccgatattttcaatttcgcaaagtacttacattccaaagacgatatatccggaatcccttgaattcacaactttcgttattattccaaatagcgacaaatgaaggttattgtcatatcatatgtataagtactctcacataaagtattcaatcataaaaagatgaagtaatttgaatgttttggtcgtctaaaaaggtgcatataacattagagaaatctatgtattcaaatttactggggatcaaacaccatttcaaggatttcccatgggaagtgaaatttagaatagttgtgtattgaatagcgtcaatattactctgataaagttttcacgggtttttcttttctttttccacatttaatttagcctggcagttgataactttcgacgatgattcaggctcggaatgaggaataacagaagggttttcttttaatttaatcacagaatcctttgaaatgaggtcctcctgaggaagtaaattggacttccggacagaagggctagccatcaataaagctgaatcctcttcatcaacatttttcgtttgacgtgttgaaacttcaggggtaacaagaggtatgtttttaatattccatggtgacagaaacgttggtgtcgcaaaaattccagaatgtctggaggaggatactgaacctggactggcgcttagttcacttcgattttctaaggcattatatgaagccggatctcggggcctctctcttccttgataatctttaagatacaatgcaatttgttcgtcaggtaattgtaaaactgattcttgggtagtactttcgagcgcgcataatctaatcaaatactccagtaaagttaaattaggttgatcttttatagtcgatggaaaggaagactttttctttgcaacggattcttgttttttgatgcctaaaagctgtagcctagcagcttcagaatcactaagagattctgcaagttcatcagattcgtctaatgattcattaggtattgataccaaaggaagtgcttctaaagctatccagttcgaaggtgctgtatttgaagaatactctgtttcatcatctgcatacttgagtaataatacgggagtttgtacatcatctaaccgaagaagtttaccggacaaactaaaaaaaagcgtgcgcacatcatttagtgaaatggttttggtgacaggagtctcatcttcatcatggtaacgatcatcatcaaaagattgttttaaagataaagcataggctagaaccgtatccttggacttcaaccgttgaggaggcatgcgaaacattttggcgatacaaacaggcatctcttctttccacatgactaaatcattgcttatataaccagacttggcgtggttatctataattttataagttcgcaggaaaaatgtggggccaacttgtaaaggttcatttccagtaaatgcaacattcgccctatatatgtatgaattagctcgtagaagttgggaaaatgaagtagattttggaagagaagatgaaatagaagcaccagaagtagtgatggacagatttaagagaggaactgcatcattaattttgagaagtaaagttttcatttcacgaagaatagacgtatcaacgttcttctgcaaagtttctttttctgaggaaggcggaaattccgaatgagcggcgcttaaaacatgcttggtgaattgttcgatgtcagcgtgcaaagaatccactaattgcttagtactcttaaaattttcattttcaccgactgacattatttcaattagttcgatagcaggcgtcacaactcgaatcatttcaagcagttgagttttcacagactccaattcactttgatcatctgcagaggcacgtttaatatagctgctaacttgctgaacagctaattttcctgcaaatgatatactatgtttcaacgcgaagttcgtagcaaatgtcgcagcatgagaagctacattaagtaattcatccatttctaaaaaggcggctttaaaaaacacaagagaaaacaaggctaaacaaataaataatggtcattcaaattgtatttattccttttaacaacaaattaataacgaaataaaaagaagcgtagtaaattgagaaccaaatagaacttgcgctaagtcatagtgatatgtggaggatagaagtttaatatccaaacacgcctatagaattttgtataaggaaatcctaaagtgaataattatataatggatttacatattgaatcttttggaacttgcttggtatatattttgaagctgtaacgctgattcatcgtttcttccatgacaaaatccttgcagtgattattggtgacaatggagactaattaaccaatagatttaaaaacttttgattaattgttcaacccaatagctaataaatgttgtgtttggtattaagcccaccgaagtttctgttttttatctcccaaggcaagtcaatatattttacctgtttaagacaataatagcgtattactgaagaaaaaagcgagaaaatgaccaatttacaattcagttgcttccgattttacaaccaaatgtaaaattaaactcaaatataatattttatgaacttaactgaattactatagcacaagcttatataaaggatgctaataatatcatcgtaagtactcgtaatattatattataaaagaatacacagtgtatactgtggtgtaaattctcttcaacatcaccgtccctttaccacatattttaataaaggcaaaaaatggctagtaatcagccaaataacggtgaacaggatgagcaactcgccaagcagacttctaaactgtcgatgtctgcaaaggcacctacgtttacgcctaaagctgctcccttcattccttctttccaacgtacgttttttaattagaacaccatccatatgtcttgagatgattgcttgttttaagtaaaaaaattattaacttcttgctaggccccggatttgtacctgtgaacaatattgctggtggttatccttatgcccaatatacaggccaaggacaaaacagcaactcgccacatcctacgaagagttatcagcaatactaccaaaagccaacaggaaacactgttgatgaagataaaagccgtgtccctgatttttctaaaaagaagagttttgtgcctcctaaaccagcaattcccaaaggaaaggttttgtccctgggtggaaacacctctgctcctaagtctacaaagcccattagcatcagccttggtggaacaaaagctcctacaactaccaaaccagcagcacctgctgcacaaagcaaaacagagacccctgcacccaaggttacctctgagtcaacaaagaaggagaccgctgctcctcctccccaggaaactcctacaaaatctgctgatgctgaactagcaaaaacaccctctgctccagcagcggctcttaagaaagctgctgaggcagctgaacccgccactgtcactgaggatgccaccgatttacaaaatgaggttgatcaagagcttttgaaggatatgtatggaaaggaacatgtcaatattgtttttataggtcatgttgatgcaggaaagtctaccctgggtggtaatattcttttcttgactggtatggttgacaagcgtactatggagaaaatagagagagaagctaaagaagctggtaaagaaagttggtatctttcttgggctttggacagcacttctgaagaacgtgaaaaaggtaaaaccgttgaagttggtcgtgcttactttgaaaccgaacaccgtcgctttagcttgttggatgctccgggtcataaaggttacgttacaaacatgattaatggtgcttctcaagctgatattggtgttttagtcatttcagcgcgtcgtggtgagtttgaagctggttttgagcgcggtggtcaaactcgtgaacatgccgtattggctcgtacacaaggcatcaatcatctagttgtcgttattaataaaatggacgaacctagcgttcagtggtcggaggagcgttataaggaatgtgtcgataagctcagcatgtttttgcgtcgtgtcgctggatacaactcaaagactgatgttaaatatatgcccgtttctgcttacactggtcaaaacgttaaggatcgtgttgacagttcggtttgcccgtggtatcaaggtccatctttgctagaatacttggattctatgactcatttggaacgcaaagtgaatgctccattcatcatgcctattgcctccaagtataaagatttgggtaccatcttagaaggaaagattgaggctggttcgattaagaaaaattcaaacgtattggttatgccaattaatcaaacccttgaagttacagccatatatgatgaagctgatgaagaaatctcttcttctatttgcggtgaccaagttcgtctccgtgtccgtggtgacgattcggatgtccaaactggttatgttttaacatccactaaaaacccagttcatgctactactcgtttcattgcacaaattgcgatccttgagttgccttcaattttgacaactggttattcttgtgtaatgcacattcataccgctgtcgaggaagtttcatttgccaagttgctccataaacttgacaaaacaaaccgcaaaagcaagaaaccccccatgtttgctaccaagggtatgaaaattattgcagagttggaaacacaaactccggtttgtatggaaaggtttgaggactatcagtatatgggccgtttcactttgcgtgatcagggtactacggttgcagttggcaaagtcgtaaaaattttggattagggtaatttcggcaattttctcgtgctcgggatttgtttctatgcaaatgtatgacactttatggttctactgtatataatccaactaggacaaaatgggatttgcttattttttagttggtggactagcggtatggtagaagatgtatatctaatcgttatatacgcgtattactatgcctaatttcaatgcgatgggttgtatatatgaagaataatggacattcactcctttacaccctattcactttgaaattatttacttttttcgtacagaattcaatgcgaggagtaggtcagcaaatagtaaataagcagttgcactttgcagctatggaagggtgaaatgtgataataagttgttgtttttttacaatccatattaatgattaaaactacacttgaaatcttcataatattgtaaaataatagtttatttaaatcactagatatactgaaatttattgtgctactacaccaaatcttaccgaataaataccgaggtggatcatatttacagtaatccgatcattctaccgtttacattccaccagcatttctgtaccgtatccgaatttcacgtactcttttgacgttgcttggttttaagagtaagcattgaagtgttgaaaggtatagtttttgctattccgtttaggaatacgggacattgacgttttgagatgacactgctggagctccaaaaagaatgtatggttatttgtgctggtgtattactaacaaataagtgtttcttagcaaaattaattcagtagaatgtgctacgaaggtaagagatggaacccgtgaaacttataacgtgcactgaaatgtttactgggaattttgatttggatattgtttaaatggaattgaatttgtgaatatgcagcatattatttcctccgacatattttttttaaactatcaaaattggcctatttctaatttggagccgttcagtttcacatctttggcttttggtttgtgcctaacagataaatagtggaaagttctaatcgtggataccaaaacagcggacattattaaccattttatcactattcacagccttttagaggagaaaattgccgctgtcgaaattttggagaatccgcgtacccccaattcgtcattcgaagcgttgtatatacttcattcagaggaaaaattagttgattgcattctgaaagacgaagaatatgataaaaggtatccaggaatacatatcgtattcctagacatggtgaaggagccactaatcaataaattacgaacgtctaggattgcctcaaaaattcgtacagtccaagtcgcctatttggatttcactagtcttgaatcaagatattttcaagtacatgattccttttccggactacgcctttaccatccatctaacgctgcaatcattcgtcaagagctttccaaggttgcgcatggaattttttcagtttgcgtcagccttggcatctcccccaacattcgttgttattatccaaaaaatgccccacatgcatccaaaacgatgtccttcattttagcaaatcaactaagtgaaattgttgaagaatactgttctaaacacccgggataccatgaagccgcctcaaaatctacttgtctaattgtcgatcgatcattagacactgcagctcctttcttacacgagtttacgtatcaagctatgattcatgatcttttacctattaagaatgaacaatatccttatgaaattttgggtcctcaaggtactgagaaacgtactggtaaattggatgatgatgatttagtttacacgaccattcgacatatgcacatgagagatgctattgaaaagctgatgaaagatttcaatcaattttgcatcgacaatactctgtttcttgataaagaacgtgccacgtccctgaatgacatgcgtagtatgttggcgggtttatccgattttcaagagctcagagatcaatattcattacatctaacaatggctcaggaatgcatgaatatttttgaaaaacagcaattaaacttgatcggtgctattgaacaagacctttctactggcagcaacgttgaaggcaaagtcccccgaagtgtactttctgaactgctacccctattggatgaaggtaatgcagaagagagtaccaaaattcgccttcttcttttatacattatatatcgtgatggaatcattttgcaggacctatttcgacttttccgtcatagcaatctatcaacctctcgagaacaaatatttcaaaacctagagcagcttggaacaagggtgattaaaaacttgactgatcaaagcagcaagagaaaagaggttgcaaattctcttcccgcaggtgaagatgtttatgaactttcaagatatgttcccactttaaaggtagtcttggaaaatcttatccaagataagttggatccagagctttttccgtacgtccgaaataccactccccagacagaagtaagtatggaacagacctctctacgtagttcccgaccatcttggactcgatctcgttcaatggcttccaaattaccgcgagaaaaaatgctcgtttttgttgcgggaggcactactttcagtgaattacgaacctgttatgaactttccgataaatataacaaagacatttatattgggagtacagtatgttattctccaaatgaatggttggactttttctcaaagttccaacaaccaagagaggcattaaaatttcctgaagataaacccaggcatataccatgcttagaggctcgccctagtcctaatagaatacaagaacagccaaacattgatgtaccttcgactagatatgaaaatacatcatcttccgacgctgtttcaattcataaagatgaaaagaaaagtaaaggaaagtcacataagctaggaaagctaatgatgagctcaaagaaagacaaagacaaatctaaagaaaaagtacccacttacggaaccagtgataaaaagaaaaagaagcgttttggtgttttctagatttaagtgccttttgcttcattgcaccatgtgagaatgtataattaccagttttaatactggcttttctaagcatttcaaaaaatggccctataatcccaataagctaactaggtattcaactagaattttgttttgagttaaaaatgtaatgactattcatattattaatgaaagagcgagttcaatctcaaaaaaaggaattccttgcccaaaaaactaatatctatgcagtgaatcccattttagtctgctgttatataattcaacgtgttcatttggggtataattatggttcttgttcccaaacaatcaaatgaatttaatgaacagttaatggacgaagcaaaagctttaacctcgaaacgcaataccaaaatcattatttcaaaatcataaaaagcgttattggtcttgtaaaacacttttaaaatgattttcatcaattgttgtgtagatgattccttcttgttgaagaaaatcagtaaccgccgtaaggtctataccgggacccacgctttgagcaagttgtctaacgtgaacaccttcattcgtctctggtgcactatggatagcttgcataacggtcatttgtgcgggggttagtgaatattcagctagtttttgttccagagagttggcagcaccatttgaagaaatgttattgtagcctagtgcgttggaagttccgtagcctggagcgttggctccgttcacagcatttgctttctgagtgaaatgtaggtgtacagcaattgcttcaaggaaatgaaaatggacttcattatggtctttaattgtacggatgtattgagaagcaatgtaaatttttccagaaaatattttgatgtttccatacacacgaacataggtgtctgtagcaagttcagatagcgcatcaatgtgttcccaatgccttacttcaatcattcctgttccatcttctatttgatatgttgtgtttgtagtttgagcgtgaatgttccgtaaaactcctacaaaagtaacctgtccgacttcaacgccatctatcttgaattctgcatcagcgtgaacttgagaggcattgagaatttgcttaatggtaacaggacgtaatttatttccagctccttgttgctaaacattggaaaaattagtattagatatttttatgaataaggtcagtgctagtacaaaactatcaaccaaaaagtatcaccttgcggttattcaaacaatagttttagtattttatcccacttactctatcgacgctgggctggctcgattgatcatattcattaaatccagcgcctcctcccattcctggagaaaaagcgctattgaagtcgggaccatagcccggcttgccaaaagcatcataagccatgagcacgtattatctcaaattatgaaagtttgttagggtgaattaaagagcgatgaaaaagcaaatcaaccacttaaaaatatatctgcgatcttttagagagtgatttttaaataattgaatataaagttacagctgattccacgagtagtctacttttcagtggtgtgtttagtacaagttacgagtcgcgtttcgcggtggtgtaccgaaaagaataaaatcaagcaagcgtgcttatatactacaatgtaataaaattaactgttttatttagaaaaccatcttacatctactttttttctctataaccgtatagttttcaatacaaaaacctactaatcacgggatgctcaattgacttaaaacgcttaaagcaatcagatactgtgctaccattctgctttaccaaatgtaaagaaaaactaaaaaatacattattaaatttgtaaacattaacacattcatatgtaacaagaaggcatggaacaaatgtccgacgcaattttacaaatcgtataggaagaaaagcgatttatccacaacaaaagaatagctaatggtgaatgactattcgcacatcgacatatacaaaataagaacataaacgtattgctatgcacaatccatccattttatgtattgaggaaatatagtattggggacataaattttgaatatagttttgaagacagatgcttaatgcaagcagtaaaatgtaagagcatctgaaaaatgaaaacgagtgaatgatagttggtaaagctgaacataaacattctatataaggaagaattgtttaggcgactaagcgttccaaaaatgaattccccgagatgaatagaaaactgtcatagacacagtacatatatatacatcgataattgtgagcggccttatcaatttgaagcagccaagctttaaaccatcttccaatccgagccttttgccaagttaagtagtgccaaaatttaatacttcgaaataaattctgggaagcgaaaattaaagtatgacatatattagaggtgatgcaaaaatgggagatattaaaatattagttggtttaccacagttgtttccattcacattccattgtcattcactggatggctttaacaaaaaaggaagacatatgaatgcaaaggctatgagaaaattttaagaagtaaagtgataataaaatcgtcataaaaagaaattataatacaagaagaggagcttgtgagacttcaccataaacaaaaataaaaagaacaaatccttctatttttcctcaccaaatttaccccgccaccattttaaagtcaactcctttatttgatcccaataacttttactcgaatctctttccttcaaatacgtgtagccacgataacaaatccaaataaaatctgacaaggcaataaagatggcaacgaagttgtctgcaaagactgcaacaaatgcgaatcgtttgcatgaaccagagcagtgcaacggttgggcaagtataacgataatctgtatttgagggagaatccacataaagataaaaattgcaggataagcaaacaaaaacttagactgacttaaaatgcgtttccgttgtttaaggaggggatcatcttgcatatcatttccatatgcagccaaaacactagaagcaccatcttcgtcactagtcaatggactactgagtttaaaactcgtgtgatcttcaaggccatttgtgcgatttggactatccctaaaatcctgttcgaaatgtattcctgattgatttagattagcaggagtagactgcgaaccaggaggcaaattaggatgcacagaggatagtaacggtctcgaatagggagaaggttgagactgcgaggagtaaatggattgagaattagatggagtatatgttaaagtactgttggtgtcgggaaatggtggaagagctacttgatccggagcggtaggatacgaatcaatgacatttaaagtatcaaacacatttgtttgttgatgtgagtatttcttgaaacgtttgattttccttctgatcgagatgaacatgcaagtttgtaaagcaataattgcaatacttagcgcataatcaaatgaccaattcaaaccaaacatgaatcgtacaggggtatagggaaggtagcatcgggtttgtaaattgacaaatgtatttcttttattggtaaaagcaagtccgccaatagttaaaggaattacaaatgacagtgtaaacacagtatgccgaaaacgatatagaccccttcgttcagtatcaacatgggggaaaagcaccaaaagagcattatgcaatatgttgataaaaatccaataatcagtcatccgaacaagtaccaaaagaaaaaatccaattgtaaagcatcgatgttttggagcccaaaaaaaaggatcgcttaatgctagacatggatgaatcatttgcacaatggaacgaataaacaatacagaaaaaagagcgatatgaaattgttcacgtattgttcgccgacgagaccatcgccagaagatagcaattaagctgaaaacgatagatatggctgaagctataatgaccatgattctcaggttagctaactctctgcgagagacaatgatgatggaactcgtactcgtggcatcggaaacattaaacgtataatctaaatgaagcatgagcaaccttgttccttattacaaagtttaaacttctcttcaagaagacaggaaaaaaaaagagaggagaggaggtgagaaagtaaaaaacaagaaaagcaatatcagaacgaaaaacaaaaaaaaagacaaaaaaaaaaggaatactccaaagacaaatctatgacttcagaaatgttcaaatagacaaacaagaaagcaaaacagaattttcagccacttgggtaatcagtcctattacccttaagaagtgcaaaaaatagtatatctcgtatatccaattacccaagattgcatatctgaccctcgattttctataaattgcttcgttcgcgaatataaacagtctcttcaagttgatgtaaaaaacttagcaaactggcaatatagaaggagctctctaaactaaacgagtttgtttcgaatatgaatttgaattcccgtacttttatttttgtttctgttttcttttttccaaaaacaagcttctcgtctttacttttcaattaactcaactattctttcgaaagttgtagacacacgattaaactgttaaaggtaaaagttgaaatagtaaatctactgctttttcctttaatcgtggccgacgaagcagctcaaaagtgataaacgaatgcaaccaggaaagccggacgcaaaacggtgccgacgattattaataaagcgcagtcccgtctcgacactcttggcaagaagaaaagcgcaattgacgtgaacaaccaacgatgtattgtgcttataaagaaagcactagtgaagtcacttagagctcaaagccacttatgcacgttttgcaaggctcttaatagcgtggcgaaccttcttaaggatattgaagaatagggaaatcggaggcggtatggcttgcaattaacgccgtacagtgaataaagcggtactaaatcaaatcggtgaaatttaccgataattaaggaaaagacaaatcaattgaaggcgccgtggtttgggttggctgatggagttggcttgattataagtaatgatggcggagagttgccgcctttgctgttgtgtatgagtgtgtagtgaatatgcacaaatatacctcaacgactaatggataaggtgttatagcaagtacagtagttaagtaccaatgcgggatttttctgaaaaaatatgcaagcacacgggcttgacagaaacacaagaggagacaaataaaccaaagtctccgcaccttaagtccacagaagaagaataaaaaaaaagatcgcaattgaattatgtgagggggcccaggcgtcaatagtacagagtcgattgactaagtagatttaagatcacaagctgtagagcaaatcagaaatttgcacctacgcagagacaatgaacaattgtaatttcagaaaaaaaaatatcgacaacgattcaaattccgagtaattttctagcaagactattgaagaaaaaatttccctaatcccttgatgagccttgtcgcactaacacaatatcggcgatgctttcacactcctagatgtgctaccaccaaccattataacttatgaaaaaaatttgtagtatcgctgtaaacgaaatttttgtgtaagaatgacgagagttgtttttgcacagacaaacgaggttcggacgatcggcctattttttaagtacgatagtgattagtatagtatatcgtgaggagcaaatacaatcgcataaaaaaaatcagggtgaaaagaatcatttcagagtgcgttaatgagaaagtcctcgttataaaagaaaaaaaggaaccgatgatttaaagttattgatggttttaaaaaacagcgtttatttttacagtgtttaaagtcaagtcaatattaggcacaagaagaggtcacactttattttcaaaagaaaatggatgaaatgcaactccatgcgttgcgataagcgttaaacaccaatctaggaagcagtccctcaacagaaatgaagcgaaaatcgaatgatggtgagaatagaataataaaacgagccccggtaaattgaaagttgatagaatcaagtttcaattaggggtaatgaaaacgtgcttaaaaatagggagtaatgttgtagttaccaaaatgaacaattcggaccagaccaataaatattgtcgaaataaaacaaggagtgttaaattttattattatgtctttattctccttggaaaccggttcgtccacgtgaagagaattctattagcattgtcgaaaccgtttgatccggttatgccttcatatctttgaaaacatttccgccaattccaccaagtgaaaatcacaatatcgttagtcggtattgtctttaggtttactagcgggggcgtttttgttttgaggaaaaaagaatattctctggtttccatctaccttaagtgccgattaggcagataagctagattaagtgaaatgggaaacgggattcattttccattgacaacacttttaaacattatttgataattcgcatgcaacccttcaaagtcgattcgacattttaaggtttacttcacggacattgaaatcattgtgaagctttgtagactgttgtctctctcggaagtacccaaaaaaaaaaaaaaaatcctttttacactcataacgttctagctgtttcatccctttaaaaaatatcatgttttttttttggtgctcggaacatttactttctccacttggttcgtctatttttgaagttaaactaactatttgaccattttcgtacttaatgtcatgaactcctctcgtggattgttaagtcaattatcaaaaccaaccaccaactcaattttaaccgttgtaacctgacccattattaacactagtattcatgctgtacttgcggcaattcccccatcaaaaagttttcagagttgtcttttgataccgattatgtgtcgtggtggaggcttacaccccaaggatcggaacgggatcttctcaatttgattttaatgctctgcatggacaagcctaagggaaaagagtcatgcaacaagtagagaaatttatttcaacattgttgtgttggcggtttctgtttgctaatcctcagcaacgatcatatgcagttgagatctcgaccaacttttcgttaaataatgtcaaaatttgcaacaaatgttttatcacggtactcgaagaatgtgaacttaatgaagtttctcatttggttgccaaattgtggtcacacatcaattttgtcgaaataaccattccgatcctgatttcgttccatttttactacttttttaaatttgggattaagttgaattggtctgtcttcctacatcttgttccatacccgttccaaactttgacataattggatgaagctgtcttgttttagatagaataataccttggagcgtaattgcttttcctcttcagtaagttctgttggtaggatttgtgaagtcgttgggggtgatggaatcaaatttgcgtatgcttggttctccggttgagcaacccacgaagcctgtgtctgagagttcagcggcgtagcagcaataatggggtattgtgagtttgcaccgtaagagtaggcattacgattgggattaaaaggtgatgaagttatcaccacgttttcatcccaagtgggttgttgtgacgcagtaatactttcaattgatgtatcacttcgaaggggcatttgggtcatgcccgcatccccgcggaatcgcttaagcggtggtgtattggagaagatttcagcatttggcatgacatgctgcagtggtgctggattgacatagtttgtgctattgttcacagcagttgttgctgtttgggtcatggggatataactcggttgtaataaaagatttggctgttgcgccgatgacttgttatatgcattgttcatcaacgaaagttcctgtgagttattagattgactttgggagttattgaattgcttcttctcagaggaagactttgcatctttgaacaccaggcctagcttctcaaattcaactttggctttcatataatgcacgtcagatgggaatttcacttgaaatcttttcatcacctaaatttattaacaacaaaatacgcttcatcaacactccatttttttttttaaaaaaagaggcctcaatgtgattttgaataaatctgcttttgttttacttacattattagtgaaagcacgaatattcatacacggagcgcgtgaaagcagagttagacatttttccttcgttcccggtatcaattggtgccagagatctaacaagtttatactttgctgtttgtttgttaaaaatattgaatttttctagcaatatggtttcatgtcgcgtacaattaattcttcgtgttgacgaatttgaagcaatccagacgttaatgagagtgtaaaacctccatctgaataatgtgaccagttgatatgggaggaatctgtagtatacgaatcctcagctacagagtacttaacaattgggaaaatgttcatgtttgtttatgtttgaatatgagaagacgcgttagactgaacctcatttatctgataacgcagtacgttccgtcacggtgtattacttttgtttacatttatgagttgacctgaaaacgactagactttatggaatgtaagtcttgttatcacaatatattacatatgattgtaatttgccataaggaaactatttcttcaatctgtattgaggaatatctgattgttcattaatttctcaagtctcttcaaacaacagtattttgagagaaaggaaattttatgagcagtttcttcttttactaatcaatccctttaaaatatttttatgccttcatttcatccttggtatctacacttatataaaaattttaggcatatttgcctgttaaagggaaacgcaagatacggacttgcactgcttttaaattatgcgttttttccatcagaatgatattttttttccttaatattatatttcatcctttctccataggttggaagggttggcgaactgctttgccaatacccagactttagtagtgtcgtttgtataattaatgaaaacctaaaatgtggacatggagaaacctgttttaaaatattaacatgctcttttcacaatagaaactacataatcattattgtttaataaaagttagcataacctgcgattttacaaaaaaaaaaggtcttttagtcagaaaaaatgaaactctttctcgtttcataacaattttttagttctttcttctatttgaacaatatttttggttaaatgtggaaacgtcaattaaacaccgtatatgctgatttcatattcttcgcacttccactgcccaggtttacaaaaatttccaaactccgtgttaacaggaaatttggtgctaaaatcatacctccattaataaataacattagaaaattatttaccatgagctttgatgccgaaaaacaattagctattgctgctgtgcgcagagctagctatttgaccgaaaaagtgtttaatcaacttatcaaggagaagagtgctgctggggcacttactaaagatgataaatcacctgtgactattggcgattttggtgctcaagctatcgtaatctctatgttaaaagatgcatttcccaatgatccaattgttggcgaagaggattccgactttttgagagaaaacacccaaacctgctctcgtgtttgggaattagttcaagaaactatccaacatgctactgaatacaaagagcttggtcaaatcaagtcagctgaagaaatgatgagcattattgaccaaggatcatatcacggtggtcgcaatggtcgtatgtggactttggatcccattgatggaactaaaggatttctacgtggtgcccagtatgctatttgtttagctttgattgagaatggaaaacctgtggtaagtgccattggatgccctaatcttccatatgactttaatcagcccgagacaagtcccaaaggtatcataatgtccgctgttcgtaaccatggttgcttccagtattctctccataacgaaaaattagaaccagttcaagtgcacatgcaagatgttcaaaacaccaaggattcaaaattttgcgaaggagtagaggctggtcattcaatgcaaggaactcaagaagaaattgcaaagtacttagggattactcgtggacctaccaagatggattctcaagccaaatacgctagtcttgctcgtggtgatggtgacatctaccttcgtttaccaaccaaaatgacatttgaagaaaaaatttgggatcatgctggtggttctcttcttgttgaagaggctggtggtgttgtttctgatatgtttggcaaacctttggactttggtgtaggaagaactcttaagaacaataacggtgttatagccgcctacaaaggtatttttgaaaaggtaattgaagctactgcagctgtaacatctaaagaccctcactttcaaaaggtcgcccaataatctgtccgaaatattctagctttagggctttatttagatttttcagcatgttagcatatgcgttatcgaggattctacaaaaaatgtaatcttgaaaatatttacttgccataagcttatgattagctccttttaattagatcaaaacaattaacaacatgttatatgtctttatggatgacatattttatttaccttaaattatggattatatagtagcaatgtttaattgttcaggtatagttacacaggtcagtatgaataggttaattgtatagttattttccatattaccttactattttacttttagtattctcgtaaatttactatacggtggtgttgatcaatttcaaggaatttatgccttcaagtgtggtttggctaataacatggacatgttttcttaaaacggtaaaactttttaacaattttgatgaaacgaatattgagctcatgatccaaattggtattttgagatccttcctaagtactttgacttgcgctaccttgattcctgctgaaaacgtttggaaaaggcatgtaataaaagttttctatgataatatttgagacaccacatttttcgaaaagaaatataattttttaactcttagaacgggtgataatgtcatttcctaccgatatggagacaaatgaaattttggatcagttagacaaaattgacgaaagaaatgaagatattcttttaaagtctctaaaagcttctaaatgcacatataagccctggagcagagaagagtttttgagacgattgttgacttatagaagtcggtgggcttatgtaaacgatcctcaaattggtgagataaactgctgccttaatgggtggctttgtgaatccaataacattttagtttgcgatgtttgtaggaataaaattaatttaactgctttacagcaagttgatgcagagaacgattcgcttaatgaattaccagaaaaaactaaggaacggttggaagtatctttgaaagaggaacaccaagacaattgcttatggagactacataaatttcctccagacatttatcatttatcagtatctgccgaactggttcaggtcggacgacggtttaacagtctgtccactcgcttggtatctacgcatcttcctgaagagatgaccttaaaacgtcttgaaaaggttgcaaataaaattcgtgttgattgggagaaagaggacgctgctgttttgcttggcatcgcattgactggatggagtgagcaagttcctggtcgtttgtatgtgtgtaactactgtcacagacgtttgggtgtttggaatttacaaagtgaaggacaagatttcgacgtattggaagaacataaaaaaagctgtccatgggtaatccctcaaccctttactgacttacttggttggcaacaaatttttgaacttctgtgcaaagaatccatattccaaagtacaacaaaaactatggatgtttcacagtatacagattacacatttagtttgctccaaggacttcggtagatggacatacaggtatttaggactttagcaatgactgctacgcaaataatttattttcaaaaaactattcgaaatcaaaataacaaaaaaagtaaatatttaaacacaataattgagggacagtttttctttgacaaaatactaatataggaatctaagggcgagagattgagattaaaattatagtacaattattttacccttgagaccataattgtagcaatttctgatgtatcgattcataatcagtgtcttttctggtttttggcacatgtattgagcgctgtctagcatgactacgtgcactcatggatgcattaagagaagctgattgtaccccatcatctttcttcgaagtctcggcagaagcgacgatgccgttttgtccgttactaattgtctcctccctagttccagcggtacctgccgcagaagtattgaaggcattttgagagtcgaaattctgattgttactataggaggaccttattttctctaagaattcagggatcaactcacgcgtacgcaaaacattccgatattgtgtacggactaagtccataatatgctttgtatgagggttcgaaaaccgtttagaagggtttgtatccatatcatcttctactatgtcaaatttagaagatgcacgttgaatcaacagcttttgctgggttctacttgtggaagagccaaggtcgtaaagttcagcctgcgacttttttacatttgtggaaggaacttttcgatttgcaagtaacgataaagaatttcctctagagagtgtagggggttcactagcaatatctaaaagtaagttaatatatgagtaatatgaattgatgaaacatcgattaaagacttacccgagcccgaatgaatttgccattttggctgatttgtagcctgagtgacttcgcgattattcgaatgaggtaaaggttctgccataacttcattatgtactgggctcgattttgtggtactagcatcagcagctgaatcgtcttgaccggcagcgggtggacgagcagaagcttgaacatctgtattattaaagggaggagcatttgaaatattcgaattaatgattttctttttgttatcatgaacagcaacaactctggtgacaggagagctggctcttgaagaatcagccgcttcgttcgtagtgacagaaggcgtaggaagcgcactgtccgaatccaaattaccagcagtagaatcattgtcaactggagcatcgtcccaaacacaatttggttttctttgtgttagtggtattaatccatttttggctacgtgtttaggaccattgagttcatgcaagtcgttgagagatcgttgtttagtaagatgggacacggcggacgaattgtttaccaaactactatttggattttgagaatgcgctcgagttaaagcagaaggtctcatagttacactgcccaatctacctgaacggttgactcgcacatgacctccaccacgcttaagcctactgtttacaataaaattccgcttacgctccttagtagatcttgagtaaaccccttcaccatctgtacttactgtagaagaggacgttcttctcgacagggatggacgttccatactaaacgtctaaatgagggttctttggggaactgtttagaaagaaaatgaagaagaaacgaatacaagcaaaacgcttgtaaattaacctttgaaatgattaattgagtaaaatatgaacatgaagaggaatccaataaaaagctagtcaattcccaattatgactaacaaaaacaatggatcaataatgtaaaagaacgatattaaaaaaaatatttaattattaatttttctcacttgtcaattcctactcctgaagtgaataaattagcaggttaagaattcgttcgccaagataggtgaaaggaaagagaggatggaggtgtgtcaatgtgaaacgaacaaaagatggcaaatattataaaacggctatagcgtgatatcgtttgttaaaatattagatttatttcaattcactattttctagctcaataagtgcaatttatcattactaaaggcatgggtaatatattacaacaaacgttggtaaaaggaagatgaggaatttagtcatgtggtactcttttgtttattttaaaaagcgttttatttggtttaaattgcagttacagtttcaattctacagcaagtttatgataaaacttttcgagtaaatgtgatgtgaaattcaaggatttttttctaatcaaatgaggaggggaagatatctactttaatttaataaatcaattgattccattgctatcgatacatggataattaatttgtgggattgagaagaaattatgcgaacaaattatctaggcttaatattcatgagtttcgagttttaaatatgaagtcaaaatttgcgcaattcgaggtcatcaatgtcatttttttgtgacgattagccgtcaaatatgtttaacattgcaccggcttcaaatctttgcgtttgatgcattcactattctatattttcacttctctcgatatagggaagagaaatttaaggattttgcgtgtgctaagtaagcatgtaaatgggtttctattcgaaaatgtacgcttttttcaaatttttctactttttcacaccattaatagcggattactctacttgatgggtcaaactgaatatcctttatactattttctaatttgaaattaattgcctattacgaacaaaagcgacgagttctcaatatcataaaacctgccataaacttatgtccatttacttggttcttctgcacaaaagaaactttcatattcctttttgtcagttctcttaggtttaaaaaaaatggcaaagctacaatctaaatcttcgagcggcaaaatcatttattgaactttgagacgatctcaacctagctgttctttttatttcatcatttttggaaggtaaaaaataatttgaatctgtttttctaagaaatgcgtattaagtattagtcgtgttgatttagttatttatataaacaaagcaagatttctcttgcgtttttgaatttgagccaatatgttaaatttccttattgtcgcctatttttattaaatacatttttaaagttaaattaaatatcaaattttggtacaagcttccaacatgtcacgaatgttacaattttcacatagtcaaaattgattaatttcgaatattaattgccggatttcttttaaatctacatataattcattaatttagtaataggtattgcaaaaaaacttctcacttccgttctacaaacaaactgctctttctttattcccgatgattaccgcggctcaggcgctgactgaaaaagtcacagtgataatgttaccaaaggatgaaaaaacaatgatattggatttacccttctccaatttattgtttcaactagtttactagttatttaaaaagacatttcgaaaatctttctatttatgttaaaatttcctaacatttttccttcctttgggttcgtatacatatatatatttttctaatggtattgctaactcgagatttgtgatttatagaaaaaactaagcaagtttgagaagagtaagataaggaaaccattatcattctacttgaattaattctgtttgaataaatatctttggctctacaaattgtggaatattttcgtttcacgccaagacagaatttaccttttaaaaaacgttaggttcaccaattagtctttttttgctctacagtttttttttttttaaactttctttagtaatatttccttggaggctagcataccttttttttgggcttcttatttattttatttctttcgttattatgcctgaagcttttgagcgttattcaagcaacccaacttatgaacccccatggcgtaaagtgcgatttattggaattgcaggaccatcgggtagtgggaaaacctcggtggcccaattgattgtaaaggcgttaaatcttccacatgttgttattttatcccttgactcgttttacaaatctttgaatgcagagcagaagaagagagcatttaacaacgactatgactttgattcccccgaagccattgattgggacttgctcttcgtaaaactgctagaacttaaacaaggccgtaaagttgacattcctatatatagcttcaatgagcataatcggcttcctgagaccaacacgttattcggagcaagtatcattattctcgaagggatttttgctttatacgatgaaaagattcgctctctccttgacgtctcggtctttctagatacagattcggacgtgtgtctctctcgtcgactgaatcgcgatatcaactatcgaggaagggacatagttggcgttttggaacaatataataaatttgtcaagccaagttatgagaacttcgttaggcgtcaactatcttacactgatcttatcgttcctcgtggccgggacaataaattggcaattgatatggtgattaattttattcgtagaacactttctatacaaagtgaaactcatgttaagaacattgatagtttacagcaaattgtaccaaccattccccatttacccttaaatttagttcagcttaaaattacgcctgaaatatctgccatcaggactattcttataaacaaaaatacacaccctgatgatttacaattttttttgagcagaattggcaccatgttgatgaatttggcaggtgattcgcttgcatatgaaaagaaaacgattactttgcataacggaaaccagtgggaaggtctacaaatggcaaaagagctttgtggtgtttcagttttgcgatccggcggaactcttgaaacagctttatgtcgtcaatttccaacagtgtgtttgggtaagattttggtgcaaatcaataaagttactcaagaaccaactttacattaccataaattgccccgtggcattgctaccatgaatgttgttttgatggcttcacatttaactacacatgcagatgtcttaatggccacgcaaattttagtggatttcggggtcccagaggaaaacattataattgtggtctatgtttgttactctgaaagtattaaagcgctggcttatattttcccaaaggttaccattgttacagcatttctagaaagtgttgctgaacccgtagtcggtagattggatatcgaaaaagtgtattatggatgctgatataacatttatatgcgtggatataaaaaacaaaagtttaatgtctgttaggagtttagtgtacattttattaaagaattccctttgtttggattattacttgcagaaaactacggataacaggtgtttggtgatataaatgtcatattaattaattcgtgtaatttcgtatcgctcgattagaatagttcagaaattcaaagttataaataatgaagtttgaaatagtttaagtggaaacgcagtcaaaatttttccagggaaaataagagacgagactatcaggcaagcaaaaaaaaatagtaaaaaaatagcaatactatgtaacacatgaaccgaaagacaaatcgtagctgagagaatctttgaataatcatatatattaattagttttgtaaacattgaatcattagtttaaaaagtagcctccaaatctaaaattgggtcaacatatacttttccagatttcggacggaaaataggagtcaggttgcccttggaaacggtctccaaagagatagagcaaaaaaatggatgtgtttgaagtttcttgctggagtgacccaacctcttcttaatgtccatttctagaaaagccataacagctgaacgagcatctttcgagatagtagttagctttttatcccgagaaatatgaagagcagaagataaacgatctgctgatgaagccttttcttcctctgaagctcgaatccaattgatcaaaagatgattgggaaaaggtcgcacttgaaaaaggcattcgtaaaatgttatacctaaggaccaccagtctgattctttataagaaacagcgtgaattaatgtctcaggagccatatatacaggggtcccaacgcgaccaacagtcatgtttgatttagaaggagaagatgaggtatgcactttagctgcaacattaaagtcagccaacttgcaatgtcccttctcatccaacaaaatattatctggctttacatcgcgatgaagcaccccctttgaatgtatataaatcaaggcagatactagttctaccatccaaatacgaatgaccgattcattgaattttctttgggaaatatggtatcggagatctccaccaagcattaaatcagttactaagtaaattttcgtttcatcctcaaactcagagtaaaacttgcatagtagaggatggttcaatgattgtaataatagaacctcatttcttagcttcttgatcttatgctcgtcgtgtttctttttattgatgcatttaagagcaaacctttgcttagtttgacgatgtttcacgacgaacactgtactccagcttcctttcccaataacatttcgaattttgaactgagaaacactttcaaaattggtggcatttggatcctcaaaattttctttgtcgtttttaacactttttgagttactatttcccatgtataaaaaactgcggaaagaaagcacaaaggtgcagcaatgtctatttgactttggtggatagggacgctagcgaacaattaatttacatttagcatttcaaaatgaaaactcacttttgactcaagcgctgcgacgccttaatttgagtaaacggtcctgtagttcgatagcttgactagtgtaaaaaaaaaataaagagagagaattcggtttttttcttgaaaacgagtgttaaaaaattatttattaaatttggttttggataaatcagagaattatggagtctgtagattcaccatacctgtagtcaggaggtacagagaacaaagaaacttagcaatttatgggtaaacaaagaatcagggagatgatgcttcttcaatagagtcgtttaaatgcaactttaaaacttatccttttgattggataaaattaaaattagcgaagcttatgttatttctcaaaacgaccattggttgtagataactcgttaatagtaatcttaaattaacccaaggaagataaccacatttagttggtgagagtgaaaaagcacattacacgttttctacactgaatttcctttaaaaacagaaattttcacaaatttccttgttgttttaactgttagtataatttttcttccattttgggacaacctacgttaagagaaacttccttccccacagtgtacaagaggtggctgaaaactgcaatggaagtacaatgcagtacggaggtttctacataataagttcccctaataaaacacctacaaaagaagcatagtgaccctgcttcttttttctccttcacctataatactgttgcttcgttgagatcagtgcttctctctacaaaagaatttccaaacttatcgtaatgcgttgccagagttaaggcctatgtccaaagctttattttaaaatgctggagagaacagaaagtggaacttaatatgcatagtaaatataagaataacagaagcaggattttgtaagtctaaagatatttttaggtttggatacactcattcctcataaaagaaaaaggaaggaaaagggcgttgttcatttttttaaaaggaataaagaaccgtcaaatgattttaccggtttgtcgcattagcctaatttggatataattcgaaattgtataaaaggtatccaattttttcctgcgtcttgtaagtcaatctccgataaataagagattaatgtgaaaataatgccttcatgagaaacaacttatttcaaccacatctcattctcagcaatcacagagttccattatagacgttgataaaaaaaataatataaagaataagtgcagcaattacttcgtccggcttcaatttgtcctttttacaaagtcaaagttttcgaattgtcttgaagcaaacaaccctacacagatctgtctgtcataggtaacgcttaatatctcttaggaaatgaagtataacgactgtgatttccaagcgcttcatcttaccttttaacgagattggatcaagagccttggaataatttcgtttctcttaagtttaattcccatcgtccattcgctgctctttctgatatatgattaacgatttctttaaacatctcggtgaatacgagatttgaactccttcactatttccttagaagcttaaatcctctttctaagaagtaatttttggctggcaaccaagcaagtcatgctctaaagttttatgatcgttcaaaaaaataatccaactaacgtctttggcatttcgtctaatcaaaccttggaagtcgcttttcatcgacaatttcttagcttaaacttgacaaatagattacattttttctacaatattcaagcatttctttaacattttttggaactagtactttcaagtagggtcctttacttttttttttaaacaacggacgagcgcagtttttgcaccccaacaagtagcacttcaatcttaacttacccacaacaacaccacgccataatttgaaatctcaactctcgtctttgcaagacgctggtttacctcaataaatattagaagtgaaaaacgttgatattttgtcagcgaagttcctttctcgctctatttacttttctatcttggtaaatagcccgttttttcctggaaaccagtctccccttggtacgtaaaatcttgcttctttttttttataaaaaaaaagaaagagaaaaattatagggaagatagactttgacgaacaaagaagaagcggttgtcagttttggtttcttatcaaactcaccatcctttatacttgctagtggtcaattttttgggtaaccttttttgaactactcgagtgggttcctttgttttttttttcgttatcctcatttttcgttttgaaggagttactttcaactctttccattctttgctctttgtgcttacgttattttgaacaaagttgattgaaatctaagaagtcctttttcaatactttattttattatttaatttctttctgaacgttgatatatatacctattatttaatatctatataatcatctacgcttatcacagacaacgaataatttataatcttcatttaattgctacagttgtctgctcttcggtttcaataagttaaagtgtttgcgttacgtgtttgtacgtattcatcaaccgtgtgcgcttgtccttgattttttaattgtcgcaaaagaaaaggagaactgttagctttttgtcataagtttttcagttaacatgatttataaacttgctgctcggtatccaattcaagtgattgccattgtgggcatccttgtctctatggcatatttttccttcttggaagccttaactcaagaagatttcccagtattaattcgtgctttaaaacgatttggtattttggatggatttccgaacactcgtctacctaacgagatgattttaaagctaagtagtgtccaaggtgaggatgcctcggtttgggaacaaattcctgccgcagagttgggtggagaaggatttgttgattttgatatcacccaatggtattaccctgcgaatgcaaaggtcgatgttgctcaattggtagagccatatcgtaatgactgcattttccatgacgcttccggtgcttgccatttcttttttaaagaggtcggcaattggactgtatctagtattgcattaccatcgaatctcgccaatccgcccatcgattacttccttgacagttctagtactgtcattcaaagaattcttcctgcaattcgtgaacacggcatttcatggtcgtggttacttcagttgatcgctcgcacttggatgaatactttaaagatcgctagccaagcttctaagaccgaactgttaattgttggtactgcttatgcttgcatgttgatatccattgtgtctctttaccttaagatgcgtcgtctaggatccaaattttggctattttttagtgtcctgctttccactttgttctctgttcaattcgcaatgactttggtacgtgcatctggtgtacggattagccttgtctcgttgattgaaagtttgccttttctgataaatgtggttgcccttgataaagctgcagaattaacgcggcaagttatcactcgatgctctgtctctgactcccattctcctatgcatgaagatattgcaaaggcttgccgcaacgctgcaccgcctatcctccgtcatttttcttttggaatagtcgttttggcaattttttcgtattgtaattttggtatcaaacaattctttttgtttgctgctgtcatgatttatgatttactcttactgttctctttctttgtcgccatactcaccctgaaacttgagatgcgccgctataatgctaaggatgatgttcgaaaggttcttatagaagagggtctctctgagtctacggctcgtcatgttgcagacggcaacgattcttcggctactacttctgcagggtcacggtattttaaagttagatatggaaccaaaatcattcttttcatattcattgccttcaatttgtttgaactttgttctattccgttcaaacattatgctgccacttctgctgctgctgctcgattaattcctcttgttcgctctcaatatcccgattttaagtcacaaaggcttttggatgatggagtgtttgacgacgttctttctgctatttcttcaatgtccaacattgaatcaccaagcgtccgtttactaccagctgttttttacggtgccgaattatccagcacttcttttctatctactatccattcgtttattaacaactggtctcactacatcagtgcttcgtttttgtcaaaatggatcgtctgtgctttatctttgagtattgccgtcaacgtttttcttttgaacgctgctcgattgaactccatcaaagaggaacctgagaaaaaggtggttgaaaaagttgttgaagtcgttaagtatattccttcgtcgaatagttcatccattgatgacattcagaaagacgaaatcgctcaagaatccgttgtacgttcgcttgaggaatgtatcactctttacaacaatggtcaaatttcaactttaaatgatgaagaagttgtgcagttaaccttagctaaaaaaatccctctttatgctttagaacgagtacttaaagacgttaccagagctgttgtaattcgccgaacggtcgtctcccgttcatctaggacgaagacacttgaaagctctaattgccccgtctatcattacgattactctagggttttgaatgcatgttgtgaaaacgttataggttacatgcccttgccccttggtgtagctggtcctctcattattgacggtaagcctttttatatccctatggctactactgagggtgcattggttgcttctactatgcgtggatgcaaagctattaacgctggtggtggtgctgttactgtattgactcgtgatcaaatgtcccgtggaccatgtgtggctttcccgaatttgacgcgcgctggtcgtgctaaaatttggttggatagccctgaaggccaagaggttatgaagaaggcttttaactctactagccgttttgctagacttcaacatattaagactgctctagctggtactcgtcttttcatccgtttctgtacgtctaccggtgatgctatgggtatgaatatgatttccaaaggtgttgagcatgcacttgtagtaatgagcaatgacgctggttttgatgacatgcaagtgatcagtgtatcagggaattattgtacagataagaagcctgctgctattaattggattgatggtcgtggtaaaagtgttattgctgaagctattattcctggtgatgctgtcaaatcggtattgaaaactactgttgaagatttggttaaattaaatgttgacaaaaacctcattggtagtgctatggctggcagcgttggaggatttaatgctcatgctgctaacattgtcacggcagtatatttagcaactggtcaagaccctgcccaaaatgttgaaagcagtaattgtataactttgatggataatgttgatggtaaccttcagcttagcgtgtcaatgccatccattgaagttggaacaattggtggtggaacggttttggaaccgcaaggtgctatgcttgacttgctcggtgtgcgaggtgcccatatgacctctcccggtgataattctcgtcaactagcacgtgtcgttgcagccgccgtaatggctggtgaactgtctttgtgttccgcacttgctagtggccatttagttaaatcccatatcggactcaatcgaagtgcgctgaatactcctgctatggactcttctgccaagaaaccagcgactgatgctctaaaatccgttaactctcgagtaccgggacgttgagggagcaagcttgttttataatattgtcacatacacgatgatgacaaatttttttaattttgatctcccctaaaaagttacatctttgaactgttatgcctcaggaaaattagctttaaattcttttccattttttatatattcatcttttaaaagaatatggtatatccatacaagtatgtagtttacctagtgaacgctgatttatagcttaggtaagaagacgtaaggcaatgtatattgcttatgtctagtgacacaaacaaatggattatattatacggacttatattagttatctcaataaagaatttaaatagatttttaattgtaatggttttatgacttgaaattgaatttattagggtatcaactacctcgtcgctacacacccatcgacttacattgcaccaccataataggtaagaacgtgtttcaaacaaaggtagcgtctctaaactgaaaaaatagttagaagctatttgtttgaggcaatgcacgattcttcctggacagaagctgatatactcggggtatgcagttttctagacataccaaagacaaaaattgatcctttacttcaggtggacgcgtttacatccatattaatacctttaattagtaaaagcaaagattatgaaagtataaaaaatgatcgtatagttacagaagtcaattacgagcaacaattgcgaaattcggagaagaaactacttcaatcaaacgaacgttacgatttattagaggatgagcgcaagcttttagagaatgaactctctcaaatcaaagaatatcttagggagaaatcctcttcatatgacactgttttgcacgattgcagttctctcaaaagtgtaaatgaggcattaaaacaagctcaggatcaaaatttgaagcaaactgctcaacttcaaaatcttttatcagataaagaaaaggaagttgaaaagaaaatcactatcattaaagatctaaaggatgcccttgccagttctacccatcaagttttggagcttcaacatacacaacaagaaaaagcatctttgcagactaactatgagtttgagttgcaaaaattaacgcagaaaaattcgattttggaaaataataacacctggttaagccgagagcttcagggtgtgaacgacaaattgttatctcttcatcaggaggcctctttggaaaagtctcaactaagttctcaattatctgacgctgttttggaaaaagatgcgctacaacggaaagtgagttctttgtctcaacagtttacagaaagtaatttacgatatcagaatattgtagctgaactctccgaaatgcgaaagcaatatgagttttcgcaagtttcttttgaaaaagagatttcttcacaaaagcaaattagtgagttgtggatggagaaatgtgaggattgctctttacggctcaaagagttgcagaactcaaacggcgagttggaaaagctattggaagctgcacaatcatcttttgaagaacagcttgaatctcataaggaagcagaagcttccttgaaatctcaaatcaattttctagagaaagaggtatcaagtttagagtctcagctaaagttggctaatgagcgtcttcggcattatgatgaaatagaaatctcagatatgagtgaattgaaatactcaaatttactaaataatagtatgaaaggctttaaaggtcagtcctccgtctctgacttgtattccgagcgtttatactataaacagaagtatgagcaaacatgtcaagaggttgaaaggttacaacgtagctataaccatgttatggaagaagcgaatcttcagcatcctttggttaaagaacagtttaagcgatttgctcatatgcaacgggaaattgttgcaatgagtgagcaatatcagaagtcattggaagactgtcagaaagccaagtcccgttacgagcaattagagacactatttaaagataaatgcacagagaataagcattatgagcaagagaccaaagatttagcgcgacaggtgcaagttttacttcatgaactcgatttgtgtgagaacggcatagtgctaggcgtggatagtagaaagaagattaactcctatgttgaaaaatcgctcactgaagatgaaactgatacggatcaaataatttcaagcaggctagttgtatttcgtaatattagagaattgcaacaacaaaatcaaaatctactgtctgcagttcatgaattagctgatcgtatggagaaagacgaaaaacctgatcttgatggagccgagattcaagaagaaacactgataaaagctaacgaaactattgatcaacttactaaaatgttggaggaggtgagcgatcagttacgctactctttaaaggaacgagacttttttagatcactagttcaagagaatgaaaaacttttagatatggcgcctgcaactcctaattccaaattgaatactaatttaattgagcagacttcttaccagcgttcgcttattcgacttgaacagctaactaatgaactggagtcccttaagtcaatttctcgtaacaaagaaaaaaagtttgaggaagctatctcatctctccagctcgaaaaatctaatattcaattgcaacttacctctttaacatctgaacgaagcttagcccttgaaaagctaaatgatctggaaaaatcacttgttttatctgaaagaagtaaagatgaacttgatgaaagctataagtctttacaagagcaacttgcttctaagaaaattgaagttcaaaatgtttcttctcaattatcaatctgtaatagccagcttgaacaatccaatcatattgttgataatttaaaaagcgaaaacctgcttttaacttccgtcaaggataagttgaaagccgatttatctaatttggagtcgaaactttcgtccctgcagcaggataatttccatatgaaagctcaaattgaatcttcaaatcaagagtatacggcaacagtggactcaatgaatagtcgaatacttgaactttctaatgatcttcgagttgctaattcaaagctatctgagtgttccgatgatgttcgtagacttactctacaaaattcatttgatttgagggagcatcaaacattggtgcttcaacttcagtctaacatcactgagttaaaacaagacataacattgcaacgcaccgtgcgaaatcagttagaaatacaaaccactgagttgaaagagcgcttaaagtttatggaagaacggcaggagaacttgcaatctaaattaatcgcggctaataaagacacgacacaaaatcctgataatgttgaagtcgaggctatatctattgaactggaaaggacgaaggaaaaacttcgcatggccgagcttgaaaagagtaatattcaacaaaaatacctcgcttcagaaaaaaccttggaaatgatgaatgaaacccatgagcagtttaagcatctagtagaatctgaaattagcacaagggaagagaaaattacgtcccttcgctctgagttgttggatcttaataagagagttgaagtactaaaagaagagaaagagtcttcgtccaaggaacttgccaaacaacttgaggatgctgttcgtgaaaaggatagtgcactttctttcaaaaaagattatgaaaaaattcgttcagatgcggatcgtgttattacctctttgaaagaagatattgaaaaagaaagatctctaatgaaggagtgtcattctaattacgaatcagagatcgttagtcatgggcgtaccactcaaaaattgcgggatttacgtactgaatttgacgaggtgaatacgaaatatttaaagctcaaagcaaattttgaacagcagcactcaggactttcaggtgctgaaaaggattggaatattcagcggaaagccatggaagatgaaattagctccttgaaagattacattttgggacttgaaaatcaaaataaactactacattcgcaatttgattctcttagtcaacaaataactgttcttcaacagaattcttctgaaaatttaaatatatctgccaatttagaagccgttcaagataacgatttacgtgaacttgttagctacttgaggcacgaaaaggaaataatggataataaatatgagttaacaattctggataatagaggtttgaatcaacaagtcaagtctttgcaatccaccgttgattcattgcaactcgagctcaaccgtctgcagtctctgcctgtgtcaaatgaccaaacagatacccccattatcagcggaagtcaagaagttcagttactttatgaaagtaatagtgtccttagaaaggacaatgatgctaaacttggaaaaatacaagagctggagaaagaggttgaaaaactgaatgcttcattgaatcccttacaaactgaaataaatgaacttaaggcagaaataggcgcaaagacagcaagtctgaacttaatgaaggaatacaattctcgatggaaattaagatttcagtccgttttgaacaagtatgagcgtgttgatcccacacagttagaggagttaaagaaaaattgtgaagcattagaaaaagaaaaacaagagttggaaacgaaacttcaggagacagcaaaagaaaccgatacatttaagcaacaggttaattctctaaacgaagaggtggaaaatttgaagaaggaagttgagcaggcaaacaccaaaaatactagattggcagctgcttggaatgaaaaatgtgaaaatttgaaaaaatccagcttaacaagatttgcccatctaaagcaggaattgaccaacaaaaacaaggagttaacctctaagaatgctgaaaatgaagcaatgcaaaaagaaatagagtctctaaaggattccaatcatcaattacaagaatcggcttccagtgatgctgaacagatcacgaaggaacaatttgaacaactcaagtcggagaaggaaagaactgaaaaagagctagcagattctaagaacgagctagaacacttgcaatctgaggctgtcgatgctgacggtaaaactgaaatttcaaatcttgaaaaagaaattcatgaattacggtctgacaaagaaggacttgtgcaacaagtacaaaacttgagtgcggaattggcagctttacgagagcattcaccgacccaaggaagtttagagaatgctgatgagattgcaaggctacgttcacaacttgaatctacgaaacaatattatgaaaaagaaaaggaaaccgaaattttggctgctcgctctgaactcgtcgcagagaaagaaaagacaaaggaagagttagaaaatcaactcaacgaaaagtcacagagaataaaggaacttgaggaacaagctcaaaaaaattcttcggaaaatactcatgacaatattgatgacatgattaagcagcaggttgaagaaaagcttaaagaaaattctgccaactttgatgttaagttgaagaaggtggtagctgagacagaatttcggagcaaagctaaaatatctgtgtatgagaagaaaactagggatcttcagaacaaaattacacaacttgaagaaactattgagaatttgaataaacagctatccaatcctgaaaagactgatgaatctacgtcttctgtaacagaaacaaagcctgttacttccaaaccaacagctagcaaagctgatgttggtcagaatgctacagaagcttcgtcagccaagagagaaccttccggtaaatctctgagtgcaagacttcaaggaacaggcaaacaaaaaggtgttcaacgacccgctgtttcgcgtcctgttcctatgaaaccagacagtggaaaactctcaataactggagcttccaaacgaattgctacttcaaagaatgctgcccaaaacgctaaagaactgtcaagcactgctaaatccggctcccttaaaagacaacgtgacgatgcgaacaaaggaggatccagttcgaaccaaaagaaagcaaaatagatgttttcatatggttcataaatcactcttaggactattcatatttagttaacatgatttataataatgacatgagtaaattttgtattataaaatttttgtcttatttgtatttctgattcttacacagactggtttttgctatttcttgattttgcaaagtaagtactttttcgacttacttattccattattattagagataagataagaaatgcacgctaaaaagtaaattcactacttaaaaatgttaccacgactatttgcagaagtacaaattcagtcaaaatctacatatgagtaagagaacaaatgtcaaaactagaatagttaaatttaaatggattgttagtccatgataattacagagaataaagtgaactaaaaaactcggtcttaaacaaattgcgataactttatacaacaaaaaagagaaggaccatcattaggacgttcattaggaacaaataaggtcggaagtgagtgaatggattataaatcaattagagagccaacttggggctgcatagattgctgttgcatgccctgcatcggttgttgattttggtaattgtaattctgttgattataatagggttgttgcatgttttgttgttgctgcatcggttgtttataatatccggtagcttgttgcgattggaaaggattatgcgtgttaccggttgcctgagcttgaatagtctgaccagcactatttgtaaatttggatcctgtgtgttgagtcggaactctggtaagaccaatattaccgaaactatcagttcccataggattaccagtggagattgcttgagcaatgttagaaaatcgatcgtcaccagtccgaacgggtttcatgggtttagtagcaggagcagtagattgagatggcaagtttgaaaattgagcaaaaggattatttgagccagtcttcgtaggctccaaacgaggagcagattgttgttgttgttgctgaagtattccagtcgattgtgactgtaaaggacgactgtaaggattattgtttcctgtatagccggtagtttgccgttgtaatccagtgggctggggatgaacataaccagtgtggttgggagccatcattggagcattaggggtttgaccaaagcctgtacgctgaggttgcatgacagggaaagggttgttggactcaaatggctgagaaaagcctgtacgttggggttgcatcataccagtacgctggggttgcatatacccagtaggttggggattgaagaaaccattttgctgaggttgaacaaaaccagtacgttgaggctgtataaaacctgttgcctgaggttgaacaaatcctgtacgctgaggttgcatgaaacctgttgcttgaggctgaacaaaccctgtacgctgaggttgcataaatcctgttgcctgaggttgaacaaatcctgtacgctgaggttgcataaatcctgtagcttgaggctgaacaaatcccgtcgcttgaggttggacaaatccggtagcctgaggttgaacaaaaccagtacgttgaggctgcataaatccagtggcctgaggttggacaaacccggtatgttgaggttgaacgaacccagtgtattgaggctgtacgaacccggtattttgaggacggatgaaaccggtgggttgttgttggaggaaaccggttggctgtggctgaacaggatttccaaagaaatcgacaggttgataagcattttgctgattgcccataaatgcctgttcttgttgttcacgttcacgttgatgtctttgacgggcttcgtcttcttctttggaaagttggatggccttttgaagctcagcttccgaatcgttagccatgttacgacgcttggcatcttcttcggcctgacgtttagactcctcaataacacgttgtaattctggatcattttcctcggcggagttgtgttcagcgctcggggaaggccttctacttcttcgtcttgagcgtgagcgaccaggacggcgagaacgactacgtctccttgagcgatggtcacgatcatcgtcatcgtaacgactggcccgactgggagcgcgagaaagtcgtgattcctcgtagggagcgcgatcatcatcatcatcgtcaaagcgagaggaacgcgttctgtctctatctctgtctctctctctactatcacctcttgcctccttcaaagcgtgctcgtcctccaacaaagaagttatttctttagccttggtacgaacgttttggccttgatcatgaccattgtcgtcaacgtagacaaactcacgcaacgttgtgataatatatatattgtctttggcccaccgaacaacgttttccgatccattgtggagacaatactcgagcaaggataacgatttgaaaacatgtcgccagttctttcctttgtcattcagacgacgatctataatgtccataacttctagcatttcattttggtcataggttagctctgctatctccgccatggcagtgccactgggaccccatgaatcatttgtagtagcatttctaaccttaatttgcgtatctgtgtatcccttggaaaagttttttctgcgaatgttagtaacaattcatagaatattgaatggagtgcatccaagtacgtgtatgctcagcaccacatgagagatgaggtgtgtcaatcgggcacgtacgcagcagggaggcaaatcaagaaaaactagaaatcaatgaagaagaagaagcaaatttcagatgagatgatggggaagatagaaaagaaggattgaacgactttccaagttattccaacttcttttcactattctaatgatatgataaaaaatactagactagaaagtacaaaattacgccaacaaattataagctaacgctgaaaatgccatggctatggaaagaaatgatagattgaataaaatccaattctaaaatcacccaaagcatgcatttcatcagctttttggtcaattgaacaaactttacgctccttcatccccgcttgatgggttttccgcgtaaaaaaatcatccaaacgcctcaattctgcgacctctttctcttctaccattcttgggaattccctctttacttacactgatcgtacagcagctttcatgctcgatctctaactcttgagatccttcacggtttaaccacgaatgtctcgttaatatgcaaattccaaatccttctgaaaaatcaccaagctatatgctctatcgtccttctttccctacttcggcaacactgctgatgggttatggttaaggttgagggtgccgctatactatcgcgataaagcgagacgggtaggagcgtatgagaatagtcaggatacggaaacgctaagtctcgttaatttttcattaaaaaaatttaaagaaatggggtaatatttgacggtaatagatgatataagcttataatgagagaaatagttggccacctcactaataaatgtttaacgaatttaatggtgtttagagaagaaggaatgtggtttaggggaaactacaacagggataacgcaatggagtgcattctcctaaactatgttaatgttagcaacactacaccacgctatgagacacagcgttgcgtatcactatatgtcacgcgttctaattatatatcgtaccatgtatgatacgatattgagattgatcttaatgataatctatcaagatctatattatctgaataatataaatagagctactgctgaacctcgttcctcagttcagttataagctatattagtgataggtaacattataacctaattaatacaatacctatactcagttgctactcatataacctgtgtattgcaatatgatagattgcgaggaaacttaccgcagttctacgtacttttaaaacatatataaaactgcgtagctgacagttaaacactataaagaacttgacagaaaataatttcgttatctttttacaaggatttgtacttattgaaaattaaacgttttttccgatatccttaaagtacgatatttagggatcaatcaatgagcctttggttgttcgccctgttgtttgtttggcttgggtacagtgctgtcgaaagtaataaatatgtatttttggttttcattcctttctttactaacaaatgaataaattttcttgtatacttttcaattgactggtaaaagacatatgcatagtatatctagtaagaataagttggatgtatatatagtctctagtttttttgcctgtcctttctgtagtgggcaacgaaatattggcgctgaatccacttcattttaacaagaaatgtgctaaatatcatgtgcgataaaaagaaatgtaccaaaacaaaaacactgaagttaatctagagttgcttttatatgcaaccagacagtatagaacccgaaaaatgcatattaataaattcggtgtttgcaggctatgcaaattttaaaacaaattacaaaacatagatgaatatttgttgaagtaagacagtggttgaaaattggtatatatatgaatcacgggtgtatagcgctagcacatttcttatagtttcgcatgctagtttcaggagtgaaaggttttgtaaaatacttttcataaatatatttgtacctactgcgcatgtgcaaacaagcgcagttttcatttatttggttcatcttgaatgatgaattattgttttttttttacattggcttactgtcactacatctagtttaaaattcctttttttatttcattgaattaattttattttattttctatattaatttttcggggtttttttttttttttttttttttaatttactttcagatacaattcatccagagtatgtttcgatatctgttaatgttttatttcgtaactcgaatttgcatcatttgatcattattatttacttcattgttttattgaaaatgtacgatttatgtgtatattctgactcagacatctctaaaaacttcttgtcgatttttcaataaaaaccgttaatagcggcctctaatatgctgtgtccaatgtttatcatatatcaaagcgtttccagttcattattcaaataaaatattcttctcaatcctgaagcttgggtcgattttgcgggaagatatcgacgagagtacaggtttttgtttaagtggaaacattaaccattactagttgcgatgctgatttgtctttttcagccatctgttgattacagacttatttaaattttttttctccataaaaccataaggtgaaagttttattgatttctaattcttttctactttgcactcttcttttattatggatattttacttacccatttcttctcatttgttttcaacgcagtagaagaagtacagtatttggaattgtgtaaacgagttaatccaactttcacatattaagaccccgttaatgatccttatagctaatagcgtgtcaagtcataatatcactaaacatattgcttcacacagagctccatttaattaccattcaaaagtaatagtcgataatcctttcttttctttaacataacaattatttttgaaggtatgtagtaacagtgctttgaagatgttcgaaatgcttgttaaaatgactgaattctgaaaatataaactacaattctcgattatggtgttactcttaaagtgattttcttttataattaatacaagcgtgtggccttatatcaaattcaacattttcgaaattgtgattatttttcgcgtttgtttgtttgcttccctaatgtttgttgttgctttgtctttctctttcagctaacttcgttatcacttcgttttatcagcgtcttcaattaccttttgtctatttgtggaattttaattaacgtaaaaatttagttaacttttgtctagcttttatttcctcttcttcgtatcttacttggcaatttctcaattcaatttgaataattatctagtatcagtgatttcgccatataaatgcatcgtctttttggtagaaaacctcctacacagcctacggcttcattaactgacgccattgattcggttcgtatatcttcattcttatagatttttgccattgactaatatcttttattttagttggataaaagaagcgactccgttgaggttaaaatcgcaaaactagatgcccagctatctgttttccagcagaaaattgccaatacgcgtccaggtcctgggcaaacggctctcaagcaacgagcaatgaatgtacttcgccaaaagaaaatgtatgcattctctttctcccctttcttgatgtcatattactaacgacagcaatatagttacgaaagccagcttcaacaattgcagcaacaaagttttaatatggaacaagctgccatgactacggaatcgctcaaaaacacaatggctacggtacagacaatgcaggagactgcacggcaattgaaatctcaaagtaaaaacgtttccattgaaaaaatcgaaaagcttcaggacgaaattcaagattatatggatgcggctggtgaactcaacgaggttctcggtcaaaatatgacggacattaacgttgacgaggaggaactggatgctgaactagaggcacttcagcaggagtcctcttggcttggtgatcaaagcacagctgaaaaaccttcttatttgatgccttccaatgaattacctaactttgtagatgaggaagttgctgaaccttcaacagctcagtaagacgaaaattttcctaataggaaagtttcccttatcttgttttaataatgtatgcgatgtggaatttgtcatgattttgttgtcgttaagtctcatcaatcatcctgtcttatgtgtttatatattttacgattataaaatactaatcaattcaatctatcaggtaattttaattgatgtttttcatttaataaatcaatatagtaagttgtcatcataggattataagcttaattcttcattttggcgtaaaaaaagatatgaaaacatcctttataacgtgctgtccaacggtaacgctaggtaatttgaagaaactaacaatatatcgaatcaggcagacatgggtttttgagcacttaggaaataattacaagacaaaccaagcccactcgatcctggcttgtcaagtgtccactgctgtttcaaagggttgtaacaaacaccacgtatatcattaattatccaattctgttccttcaggaaatttgatagttcgtcggcacgtataaacttttcaaaagtatgtgtcccgacaggtacgatgcgaagaacatgttcggcaagcgtaatcgttaacaatctcgccaagagagttcgtgatatagttgacagtacgagtcgcccgttaggtttcactttttccattaatgaaaataaaaaatctctaggttgttcgacatgttcaagcacctccatgcacgttaccacatcaaaagtagtaggaagttgtgaaccttcgactgatccatgaatatactctaaccgaccattcaaaacaggatcaagactggcatgtttttttgcaacttcgatagccattggagaagcatcaactgccgtcactgaagcacccaacctggccatgctttcactcaagataccacccccgcaaccaatgtcaagaatcttcttaccagaaaagcagttacgctcacgaaatacttcagtcataaaatccaaacgagtagaattcattaaatgtaacaatcgacttccaccgtcccaatcccaccaagttttcgccagttcattgaagtggtctacttcatttactgacactgaatgatttcgctgttgacttagaaatccctgcctaaccaatctggtataggattttacattttttactttattgagaatgttcattgagttcatactacttcatttggctccttcttgttgtttacagtcttcaatgtcatatcattcttatataactaaaatcctaggacgaattcgttatataattttacggtattgtaatttatacgttggtcaatcgagcatgtcagctacgcagtttgatatctgtttaatgatacattggactgcgatgagttttacttgcgatctacaatgtagcggtatgcggtgtgttaagtaacaatgtatgtttattgttataagaagtctgttagtatcggtcaccgatatagctcataactgaattgaggaacgagattcagttgtagctctatttataatcttcctaaaaagttgttatcaacgggtgtctatgtatatagacggatagttacccgtgattatcaataaacggatcttagctagtattccaacatatgacatatagtgatacgcaacgtagtgtatcatagcgtaatgtagtattgctgacataccgtagtactaaacactcactattgcaatgtgtcattataatcattacgataacaaaccatcgttctgaatcacaatattttattatgctattcattatttcgtaaacattgaaatttgtttgtattaaagtaaaccattaaacaaaaggaaaaaatgataattaagcttgattcattaagaatcaagatgaaggagaaatgaatgcaataaacgaaaatgaaattgtgaatttaacaaggtggaacaacgagttttccaatttcattagttaatttaaagttgtcgtaaacaagttaaaccattattgtttgtagcgtagagtaccattaaaaaagacaaataattagactcgcatacataataaataaagactcagtcctcaatgcacattatccaacatcgtagaatgcattggttggcaatttttggtaattgaaagaatgagttaagcttatatctcacaaacttataaggcaagagaataattaaagtatgttggtgcttatttttaaaaaacgccgcagcttctctgcgttggtgattttggtaaagaggttttccaactggagcgacaaccacattaataaagcaattagacttcgctttcaacatccatttctcccaagggaatgtcattattatcgttggcacctctaaacgcatttcctatccgcccaattgcatttcctatccctccaaatgcatttcctatccctccaaatgcattccctaaacctcctagtcgggtaagtaaaaaatcattcatacagttggttgaatacacatacctaggaaagaagctataccattcccgataaatttgggcatccttttgagagcacctggacgttctggtatggttagagtaaattacaggaatatataacgaacccatttcgtaaaagaaaagaaaatttcctataacaaagagtgaagaggcttcaatttcgtagcctgtcgcgtcgatatgtttatcaaataaatacatcaaacctttcgttacaataacgacacaactttgtacacccagcacttgaaacaaaccaaaaagcatatgcttgagtgtccaaattggaatacaaactgtatgttagcgtttagcaagataatttcacttaccaagcaataaaatgaaaaataaagcagccgaaatactgcatgtggaacagatgagtgccttatttaagtttagtctaccatccttgacgcaaccaaagagtataaaacaaatgactacccatgcgagccagattgtaaccaccaaatctttttttgagttatacaaaccgaccgcaattacctttacacattttgccaagaaaactgcagtcacctttacacattttgccaagaaaactgcagtcacctttacacattgtgccaaggaaattgcagtcacctttacacattgtgccaagaaaattacagtcacctttatacattgtgccactgcctgggtccaagtttcaaagaagcctaatgagttagtgaatggacgtattaacaacttcatgcatagcttacagaaaatagcaataaacactattggacatgttataccaattgtgacggagaaagctaccttgccgaatatcgacttctccaacgggtttacacaaacccatgcagtaaaaaagacaacaataactgcaagaactgatattagtagtctcagaagggaatatatatttggatgtgaatctttgaattcttgtcttctttcgacattgggatttgcaatttctgtaggtcctgtacttgaatcctcagatacagttttaatatatttccaaatttctgaaagcattaataaaataaataacttttgaaatttggtttttttttttttttaaaatgatgtagaaggaagaaagtgtgtgccctgttagacgaatttatgctcgtaatatgtcaagttgtaaacaaacaaatacaacaaaaacattgtaaatcaaaacaaacagacacagcaaataatccttgacacactcaattctttatcttatccaccaacaacacaacacttacctgaatatggaggcaatgtgctcccatcttctgaattgtattctgggagaggacctttttccaaatcaatttcattatcgttttttgtactcaattcatccatagacgacctcaagggataatctttattcttcatttcttagaaacaatctattattgaatgatatacacacaaatagttcaattgctgtgattgcgacaaacgaaacagcgaaatcaagaatattcgctctgtagtccaattccaatcgctttaaagactttttaacaaaataataaaattgttcaaacaaatttccaactaattccttcaaacaatggcataaaaaaagaagaacgaaaaaactgaacgaggcagtggattgcttctgacacatttattctgtcactgcctttttattaagttagcttgagattccttcatgttagctacgcagtttggtatctgatttaaggatacgtagaactgcggtgagttttccttgtgacctattatattacattacacaggttatatgagtagcaactgagtataggtattgtattaattaggttataatgttacctatcactaatatagctcataactgaactgaggaacgaggttcagcagtagctctatttatattattcagataatatagatcttgatagattatcattaagatcaatctcaatatcgtatcatacatggtactatatatacatgtgacatatagtgatacgcaacgtagtgtattatagcgtagtgtagtattgctgacacaatccacattatttcgcagctcactatttgataaacaatgaaaagacgaagctagaagtaggtaagattagtatatgttatgttacggagcataattataaacacggattctaatacaatacaatggagattcatgtactttactttgatcttaatttttaaaatttgtgacaattctaatgttctgacgctagatcattagaggcacaaatttttgtccgtagccttactaaacagtatagacactgatgtttgttattcagaatttatgaagaagcaacagaagtggtgttatattcaaatgaatagcattaattggtaatttggaacgtttcttaatcagtgaaatacacatttttttttacgaagtatgaaagtgaaaaatttgtgcaaagaaaataaatgcagacaagttcattaatatttgaaccaatgcattgtagttttagaaattgtttgactgcattttctcatatgaatgtgtaaataaggaaatgatcgttttgcgatcctcatatacattcaactcttcatttaattctattcaacgagatcaaaaaaaattcttgtatgccttcatcacatagattgaagattttgacgcaaagtttctaccgaagctggatcaaaatcatcctttgcaacacttgtactaagtgcaacattactttcaagctcttcccctatgtcttgatgttgcttgcggattaattccaaggaatcgtggcctaggacaagcttttgaggcggcctgtcgagtttggcaatgctatataacaactccgcagctttgttcgggtcagtttcctcgcagccatgatagttttcccaaaatggtcgccaagacctgtcattttcgtaggctggatgaggttttgcccattgcatattagaggaagcccattctgtttgcatgccacctggctgtacaatagttatcgcaatgttccaattcggatctaactctctcataattgtttgcgaaagcccttcgacagcaaatttgctagcattatacatgcttaaacacggagatgggtaataacctgcgactgacgaaatttgtaaaatacgccctcctttaccggattcgcgcatgagattcaacgcttctttggtaatgtatgcaactccccaaaaatttacattcatttgacgatgcatttcctcaatgttgtatgattcaaattcgccaacaaggccataccctgcattgttgatcactatgtctacgtttccaaatcgcctctttgcatctttgaaagcggtttcaacagacttcacatctgtaacatctaatttgagctttaataattttgaatgctcgatggttattgtgtcgggagcacgagaacaagctattacattataaccttgggccaatccaactttcaccaatgcatagcccaatcctttggatgacccagtaatgagtacagtagaaaacgtagatttcattgtttcttatgatcgtgtttcgtcttttgagacaccacgattgtacaattaaacaatttttttgctttctcaaccaagcccgtttttacccgattactgttgtagtaagccttttcaaatggtattcgagtagttcacaatcgtcgcgtaacagacaaaccctgattcttttgagcttcttaacaatgaattgcttaacttaactctctaatccacttgctggatattgcttttcctaagtcttcatttctcgaagtgaaagtatgatgatgttgttggtgttcggatgtctgtaaacacttttcgtttctactatccgtagctcatcgtataaaagaatcctataaagggatatagataggctcagtaatgtagtgcttgcgctacgtctcaaaactcaccaccataccgctgtctcaatgtcctgaacaatttgtgaattaagttagttaactcttaaagttgtaagaatacaatatgttcttccggatactgtatactcttattgagggcaatggagtcggattcctatagccggatcctggtttttttacatgcagtgagattaatgtatcgttagcatagaagaccgatttgaaacaagaagtgttaactttttaactttacgaaatttgctgtttgtcatttcaaggttgcttctttagttgatactggtattgaaaatatttaaaaaaaaatgctgtgcgattcgtcagaatcagtttcgttttcatccatatctaaagaagaagatacaccaatcgctcgccttttgaaaaacgcaaaagaaacaccagatcatcggtttatctccgtgtacaatgaacgtggaattgttgctaaatatacatatacagaattacttcgtcgtgttaacacaattgctaaattttgtgatgatttaggcttgggaaagacagttggaatacatatgggacacgagttggattttctgtgttctatatttgctttatgggctactggacgaacctgcgttatttttaaccaaatttggtcccagcaagttgttcgtgtacttgttaaacgtttgaatatttctgatttgctttatcatgaatataagcccaagtttgaggtggacaccttaaatgctacatccttggcttcgctgccgctggatatcgatgctccttgtattcgagctggattagagccggaagtcgctcttattaaccattctagtgggtccacaggagtccctaaatccatgccatttctcatgaagaaatatgctttgggttatgactatggaactcctgaatttatgaatcatctctccactccaatggtaatggctaccagctttgctttaacaaccttgagttggattaatgccttgtattgtaatgggaacttactgtacccatcctcttcgatatcggctacttgcacttcagaggctgaacggcttgcttggaatgtttactatgctcttcgtgctggatgcgaacgtttaattattttacccaatctccttgttctaactctccaaataatgcctgacaaggaagaatgctttcctgcttgtaaactagtagcagcaggcggtgaaatggtccctgcaaacatgtatcatacatgcaaacgagtattaccaaatgcgaccatttatccacagtatggtactactgagtcgggattggtttcatttttggcttacaatgggaaagacacactgcataacaaagagcttgtctatttccctggtaaaaccgttaaaaaactaatgttagtcactgaggataacgaagctgttcctgaaaaaattggttgcgagggctttgtttgtgttgtgaccgatgtacaatcggagccttatgtaggcgatgatgctgaaactattcaatcccgtaattctacgtttataaattatgatggtcaaccagcagtgcgatttgctgacttggcggtttggaattcttataaaggaaaattgggaatcaccattaaaggccggttaggaagacgtgtcaaaagaaatggtgtattctttgatttgaaatattttgaccaagttgttgtaggattgaaggaggtaaaagacgctttttctttcttcatattcaatcgctttgtattggtgtatgttcctgcatataatggtgtggatcctgtaacactaaagcaaaaattgaacaaagagctccgagatcaccaccttttctcaagttgctttccgcttgctgatataccgcgtaacgctgcaggaaaagtggatttgaagtctatcgaaacttacgcatctaaatgcctttccgtagaagatcagcgcttacctgttttattaaaccctgtggctattgaaatcagtaaaattgcttcaaaaattctccaaaacccaagcttggaaggaaaggacgcacctctttattcctgcggtttagattccattcattctgtgagattttttcatgctattcaatcccactttcatcttgaaggcccaattcgctacaatatgaattcaaattgtacccctaactcgatagcctctataattcaaaagaaaagttacaacgtatcgtcaatcacctatgaacttttaaatgaagatgcatgcgctttatcacgtaccattcccaagttaagtattctgcctaccaatggtcaatatttcttgttaactggagcaacgggttattttggtcgtcgttttttggaatatctagtaaagttgaatataagtgttgtatgtctagttcgagagtcctctgatgaagctgctaaagaaaggttaatatcacttgttcctagtcttcgaatttcgagtgaaaatataattgtatgggcggctcatgtagaggagattagatttgggttggatgatgcaaaatgggagtttctggtggaaaatgtttcccgaatctatcacatggctgcggaagttcactggatgaagtcgtatcaagaacttagaccagcaaatgttttggggactaagactgttttggaactgagtgtgatgggacccaaggctctttactttatctctggaggtggacaacaggaagtagagcttgacgatgatactcaatctgctaaagcatctggatatgcactatccaaatacgttgctgagctcttgtgtcgaaagattagcgatttaggacatcccttaatatatgttattcgtccaggatttattatagcaaacgatggggaaattttatcgagagatttcttttggcgtttcgtcgcgacagctttacgaatgggtatttggccacaaagcgatgaatcacaatctttggtattccacatttcaacaactgatgcattgtgcatgacgctgactcaaatattggagaaagaagctgatgcgtatgctccacttttggcttatgataagtttgacggtgatgagtttgcttgtatttgtgaatctatgaaaaacgttaagctagactttgttacattggaggattggttgaaggcacttgaaaaagatgtcgatgaaaaaggtgaagaccatcctctatttgctcttcagcatgcaaccaagtttgctctgaaaagcagcatgacaccaagcaacgggctaaggaatatttatcctttgagtgaaacctttctaactaaggaagccattgcaaacgggctggagaatctatacattgaatagcttagtgttagcactgatttgtcctttggaacagaggggccaaagagatgtacaaaaattaaagattggtttagatgtatcagtaaatggtttctaactactaatctaaatctaagtgtatattaattatgctgcaattctttgttgatttatttacaatatcaagtaacaagtaaagaagcaagcttcatgttacctgacctactgatcctcactacctttataacgagtgagaagtttgaatgtatcacagttgtaaacccacaaaaaaaatttaaaaaagcgtctagcagcaggatcaaataaaaaaacatttaattgtataattttagaagatttagcttctaagggaaattgtttatttgttcaatctactgtgaagtttgggatagttgaaaagttttggagaagataatcggggattcctttttggtatagtagcaatgtcttcgtcaagaagcggtgaacaccgtcgaaattatgcgcaaggccgaaattacgaatccagtcgctcacgcggtgatcaacgagacagggattatcgtgaatatcgtcgaaattatagagacgagagaagtagtagacgttacgaggattcacaacgtagagattacagtccagctagaagacgcgatcgttacgaaaggcatcgagagtctgtgcgagaggaaagccctaggcgtccagtagagcatgaacgaaactggcaaccggagctgaagcatggccgagaaagatttcgagagcgagactatgaaggtcgacgggatcggaaggaacgaagagacggtgtctcacccttttctcctgaaggggaggggttggaaaggaaaagagagcatgaaaaattgcaagcaccatctccaaaagaagaggaagaaaggcctgttgatcaaggcgacaagatggatggagtaaaggaggataaggatgggtctttggaagtaggaaaaagccacgatgcgatgacgaggacaaagagcgctgaggaagaaattgtggaacaagaggatgaagcgacggcagagatgaaacgtattatgggattttcgggatttgacacaacgacggggaagaagcatggagacgtgggccaggtgtacaagcaaaagaaaaccaagtatagacagtatatgaaccgacccggtggatttaatcgtccattggataatgaatagaaagtcaagaaaggagggaaggtgtgtatggatagaactctttaatgaatgatatgcaagcagaatccggaaaaaagtagttgtaaagggaaaatgaagagaggagtagtttagttataaagagaacatgaaaagagatgtaaaaataaaaaaatgtttaatttagtaaagtcgacgaaaaaagttgaaatgtaaacgagagaagagttgaatcaaaatgttcgtcctaaagaagttgcgattttggaatggtgtattgtttacttggcatgaacttttgccatgcatttaacgcaatcctgcgtgaatatcgctagataaaaaccttatattaagcgagagagatagaaggaccccgcgaatattggaaattgtttgcatgtgcgcaatcaagccgaatccacttttcttacagtaagagaaggaagcgtgtgtagagtgtataaacaagagaaatgaaataaaaactgtgctaaaggaagcatttgcaaagatgtgggacggatgggccagtttatgcaaattcgttaaacaaagctttgctttctgctatggcagtaacaatggcgatattaatgactgttgattttgatgcctaatggcttgatgaaacacgacacatgatcataaaccgtgtatggtattattgtatattgtatggtattgtgtattgtatatcgtactgtgttcgaagagtataaggaaaaaatggtagagaggaaccaattaatgttttactgtaaagtagcctgcattacgttatatttgataatgagctcgataaatgggcttaatctattttcttgaaggggagaatgggacagatggatggaaagatttgaaaatacatagtgttggttgaatttgcattgggaggccggcggagcatgcgaaccattatagaataggcagtatgaaaatttagcaagcgatagctcaagtttgcatgatcgaatgagttatccaaaaaataaactggagtattgttgaattcagttttgagcaaccgaattcgcagtaccttcttacagtacctcctcacagccaagtttctaccctagtagagagtatccagtttgtcggtttgttggttgcgaaaccagtatggacgatgttggttgtcagattaagcagtgcaagttttgcagcccatgttggtaagtgaagagagacaaataggatgacaacgagcggcagggcgagagcgaggcaaggatgagagtaggaagagggaagaaggacaaaaatttgaaaaggatgtgaatgtgaatgtgattgagttggatgaaaatttcgtctttacatttgcccgttataaacgagtgttgaattattcctatactacagatttatatatctacatgattcgattcctacaggattgtaaacccacatgatttgtatacactataatttgtatatacctagtaatgattcttttattctccactccactaatatgaaaatattcttgtatggttatccttatgtgatgaaatatcttttaaacgaggtccacgcggatctccatatcagataaaaaaaaatactacgacaaaagaaggctaaaggaatagggttgagtgctaggtggatggtacgatgttgtttgccctaatacggcatactactagggaaatgttgggtgcataggcctacaatgttagtcgtaagagacgagacgagacgagacgagatgaacgaaataacccgctcccaactctataaagggttaaggatagagagaaattgagtggtacgtttggtgtgccgtttgtcgagccgtcgactgctagtaatattgtcattgtgattaccattgccattgtcaatgtcactgctattgctactgacactgccgctgtactcttcttccgatgtagctttatttacattgtatcggaaaccgtccacacccatggtcgagagctgtgggtgacgcagacattcgaatggcatgccctacaacaactaagaaaatggctatcatgcggaagctggtgagaagaacagcatcgggacaagggaaggaagaacaaagacaaagaaaacaaaagaaagcaattgaaaacaaaacaaaacaattttcattccttctcttatcattccttttcttttcttttctctcattcaacgcactccatcgtatccgtattcctcttattttttctctttctctatatccatttctttctctctaggtgtgtcctctctctctcttcaatttctctactccgcattccaacgcatccttcccccaacctcccatttcctccttacggcccgatagcgatcgtctttccctcgctatcactcgctaccggcccctcctctgcaccgtaacctcctacgtatttaccatatcataaagttttttccgacgcttatcgctgaccccctgtcgccctcctattggcttccggattatcttcttgtccataaggtgatccatgcttcctgaagattcccgaaatgtgtccactttggcggggaatcattccatccacttctttctctctcgctttcctcattcggcgctccccttccgcgtctcattggtcttccgctccgtttttgctttgccgatgttacttggggagaggtgcgataatcctttcgcaaaaactcggtttgacgcctcccatggtataaatagtgggtggtggacaggtgccttcgcttttctttaagcaagagaattccattgtcttgactatcacaaacttttaagtcttttcttttttctaaccacataatgactattcctgacaagcagttggctgccgttttccacacccacggtggtcccgagaacgtcaagttcgaggaagtccccgtcgccgagcccggtcaagacgaggtcttggttaacatcaagtacaccggtgtctgccacaccgatttacacgctcttcaaggtgactggcctcttcccgccaagatgcctttgatcggtggtcacgaaggtgctggtgtcgtcgtcaaggtcggtgccggtgtcactcgtcttaagattggtgaccgtgttggtgtcaagtggatgaactcttcttgcggtaactgcgagtactgtatgaaggctgaggagaccatctgccctcacattcaactttccggttacaccgttgacggtactttccaacactactgcattgccaatgccacccatgctaccatcatccccgagtccgttcccctcgaggttgctgctcccatcatgtgcgctggtatcacttgctatcgtgccttgaaggaatccaaggtcggccctggtgagtggatctgcattcccggtgccggtggtggtcttggccatcttgccgtccaatacgccaaggctatggctatgcgtgttgttgccattgatactggtgatgacaaggctgagctcgtcaagtcctttggtgctgaggtcttccttgacttcaagaaggaagccgacatgattgaggctgtcaaggctgccaccaacggtggtgcccacggtaccttggtcttatccacctcccccaagtcttacgagcaagctgctggctttgcccgtcccggttccaccatggtcactgtttccatgcctgccggtgccaagctcggtgctgatatcttctggttgaccgttaagatgcttaagatctgcggttctcacgtcggtaaccgtattgactctatcgaggctcttgaatacgtttcccgtggtctcgtcaagccttactacaaggtccaacccttctctactcttcccgacgtctaccgtctcatgcatgagaacaagattgccggccgtatcgtcttggacctttccaagtaagggaatgagaatgtgatccacttttaattcctaatgaatacatgcctatagttcttttcttttgttctttatgtcgtttttcgatggtacggccgttgtcaatctcagtttgtgtgcttggttgcagcttggtttcaaatctgttcatctcatgaatcttttaccatttcaccacacgtttataccattctctcatagaatcttcatcaaaccatctcggggttagagtggaaagaaagtcttgttcttttatttccttttttccatcttcaaggcttttcttttcttcctcctcctcgttcatcttgaggtttgacgtgtctgtttagaattttgagctgttgcagcatcttattttttgttttgcgaaaacgaagcgctttactctcttcatcagttggacgattgtacctttgaaaaccaactacttttgcatgttttgtatagaaatcaatgatattagaatcccatcctttaatttctttcaaagtagttgagctatagttaagtgtaagacatccaaaagtgtatatagtgataaagaaaaggtataaatgatatgataaacagtgatgataattagtagaaagacagatgaatggcaaagtgattaaaactggacgagatttaatgagagtagagagatagaatttagaaagttggatgtgtgaatgaagaaatgaatgagtatattagatgatgtagaaataatatgtatgagaaaagaaagaaggaaatgcaccaagttaaaaatgaagttccatcttaaagtccattatactactaatgcaatgccaattctgatcaatgtacaaaagacctcgtttagatggtatttttcctaagaatcgtcttttaatacctcgatagtaatgatattttgtacgacgatccctaatccaacaacctagttaagaatattgtttttccaatgcatatgcaaatggatggatctttttcaagatttgcgtctagtacatcctgtagtagtcattcctcgatattcagttcatacacatcttcataaggctgaaaacatggaacatggctgcctcttatataatctttggatgcaacgttgtgcagtgatttttttgtgatgatcaaatgattttccgacatggatcgccgtggaaaccgtgaccgttcatcctctccctctatgattggtggaaggaaccaaaaaatgccgatcagagtttgatcttcttctgatcgtagttcattgggaagaaaatccgtctcagtcaaggggtgaagggagaaaatcttacgtacgcacaaatggactgtatggcgagcgatgtcgaatgatcgacggaaaatctttatggtacattcatggcaccatcttctttgatttgcatgtcttatagcgtcaaagtagaggaatagagtgaaatgcatcaaatgtctttcatgaatgaaattactcttttccgtttgaaggatgttttggattgtctgagaaatgttttcacattgtcctttaaccgtcttttgacgatttggtacaagttttaaggtgcgaaaatcgatatcataatcgaatgagtggtgtggacaaaagcgatgtaagaaaggtaaagaaggaaaaaaatggaatgaaacacagtacaaaaaagttaatggaatgaaatttaaaaatagttatagatagtgatgactcagagagcggcaatttgaaaaacaacataataaaattacccggaatatgatttgaatacgatttcattgaatgtattagatttctttaaatttttattttcatttttatttattttatttttattttatttttttaaataataatttttataatttatatttatttgttttctgaacttgttctttgattattgtaattaaatttttatctgaaatttttttttttttaatttattttaatttaattcttttccattattgtgtatcgactattttataaaagtttctatgttctcctttttaaccgatataaaaattatgtattcttttaaccatcattatcctcttttttcttctttcttttatttacgatggattttagtcattgtaatccaaaaatcattatgaacgaatttacaaaagtcaatcagttttccctcttctaatcttctttaaatatctttttatttttatttatttcttgctacatctacatctattccacgacttgtttttccttcgtaccatcctcaagatctacatgcgccaagcaaactaaacacttgatttgcgcagccatatatgcacgtggattggaatgctggaaataaacaacagtcaagtttcatacaatattttcatgagtagctcagatcgtagtgtattttattcccttctcaagacggttacttgcgactggaaaccatatattttcaatcgcaaaattaatgttaaccaaggaaaatttgatacttccaacaatacgctttattctttcaatttaatatcttaaacatgttaaaagatcaagttagtacaacatcatcttgaaacaaatccataatgttatgtttaaaaaaaaaaaaaaaaaacctttcaaacatattattatttaggttgcaggatacattcttcaatattcgctatagatttgtttacacattaaagtatcacttttcaatctatccttggttcttcaacgtgcgtagttcatccatcaccttgataggatcgttaagacccagatgcttttgcagttctggatcagttaccctcataaatggattaaattgtttctcctgccccatcgttatgtggcctgcaataaattggttgtgattgcaaagaccctccaaatgatttaatgcctctgattgaagatgttttgaggcgaatttcacattcgattttgtatattcgtgtccaggctaggaaacttgttaggaaaaaaaaaataaaaaaaaataaaaaaaaataaaaatgaatcgcttacatagatgaccgtattattgggtaaagatgatagtactgcgttcaatgcaatatgcatttcagcagccgttccttcaaaaaagcgtccacatcctgcgttaaacaatgtatccccagtgaatacagcatgttcatttgagctgtgcgcataaaagcaaatgctatcacgtgtatggcaaggcgtatggagagcttcaatctgaacgtttccaattcgcaatgtttctttatcctgcaacacatgagaaacaccattttgatcagagcctccataaattgtaacatgagggaattcttttttaagattcaaattccctccagaatggtctgcatggtgatgagttgtgaggatggcttgcaaatcaatctccttgttcttcaactttttcttcaaaattggcattaccctggagctttgtcagcatagaattgaataaaaaagatcaattccaagctttggattattcagtcaaacttaaacactttctctgggagccatgcctgtcatgtcttcttggctatataacaccagtgtcaagtgataaaaattcttccgtttctcatgaatagctttcgataattaatacttacacatttacttcggctggatcaacaatcgctgcttgtcgagtttcctcgcacaacaaaagatatgcataattatcttgagttcctacccacattgggataggtaatatttgaaaagacatattcgttattattattttaatttttcctccttttagcccaccaacagccttcctaacgttcgaacttttatatataaacgtgttgaagtttcaacattccatcggtgatcattgaccgctctattatatgaggcttgataggcaataaattacctatcattttcaagataataatcagttatcgatatcaaagcgatgcgacacacagtcctttcgctgtagagttccattagttcaatatttcccaattctccagttggtcaaaatgcgaacgcaaagagtcagcctcgttccaccgctacattaaacaaactgatgattctatgattccatataatacgataataccattcttagcactgctcttttacaatttctcattttataacaaaagtcattccatacttagtacaaacaacgtaaaactgtttgtaactcataacccctttttaagaacttaatgatatttacggttaatcaactttctgttcgttttcattcttaaacatttcatgcgatggcaaaatgggtgtctttgattttgctaacaaaagatatactcattaattttacctgttcgtcctcttaaaactaaaaagtcacgcgcatttaatcaatggcactttctaattactaaatggaggatacctttaacattgttacatggcattagcattttcacttctcctaacatatatttcataactttgctttccttcatatatcactttcgattcacagaaagaaaaacctttatgagattttagtcaaatgatactcgcttaaaacgtctttcatacattgatcctgtaccccgtgagttttgcacaattatctctaaatccatcctacaactacaaattgtaatgaagggctccaaagtgatattgcctgacatgtcgaaacgccatttattatagattcaagaagtttttatcatgttctaagatggatgcatatgcttgttcaacctcaatgatagaaatttctctttgtaggcacggctatgaacaaatacaatatttataaatttatttcttcaaaggcatgctcgtcttaagaatttggaacattgctgctattcacacgttaaagatgcattactcgaattccatacagaattgagacattaatagacttctttggtatcactagtttatcgattctcaatgacaacttggaaattcttgtaatgactaattcaatttcgtatggctgactgccttctccattagctctctaggtgattagcaatagcatgaacgggaaagaggttaaagttttagatggctggtaagcaaatgaaagaacctagatgctatttattgactttttgactctttattaaattcttcaaggaatcgataaaactgttttaatgcaattgccgttatgcatgtcagtgaatgcttcattgatttctttgagaggtcgacgatgtgtgatatatttatcaatttccaatttgtgatctaggtactctttcaccaaatcgggaagctgacttcgtcctttcacacctccaaatgcacatcctctccatactcgaccagtaacaagttggaacggcctggtggaaatttcttgtccggcagctgctacaccgataacaatggattgtccccaacctttatggcatgcttctaaagcggatcgcattacgtgcacattacctgtacaatcaaaggtccagtctaatccaccatctgtttcatgtattagtacatcttgaattggactttggagatcattagggttaatgaaatcagtggctccaaaactcatcgcccaattttttttttcgggattaacatctatgccaaaaatccggcccgcacgttttttaactgctccttgtataacagctagcccaacacttcccaaaccaaaaacagctactgagtcaccctccttaatatcagcagtgatcgtcgcggctccatagccagtggtgataccacaaccgagaagacagacgctatctaagggtgccaatcgttcaattgctaccactgatatgtctgctacaacggtatattcactaaatgtcgagcatcccatgaaatgcaacaaggtatttccattacaggagaagcggctggttccgtccggcattaaaccttttccttgagtagtgcgaatgcgtccacaaaggttcgtcttgccggacttgcaaaatttacacgtcttacattctggtgtatacaaggcgatcactggatctcctacttggactgtcgtaacttgaggaccaacggattcaacaatgccagcaccttcatgaccaagaattactgggaaaagaccttcaggatcttttccagagagtgtgtaggcatcagtgtgacagactcctgaatttacgattttgattcttacttcgtgcactcgtgggggaaatacctgaacattttcaatcgacagtggagctgctggttgccatgctacagcagctttacagttaatgatctgttttaataagcaagactctgtttttatttaacttaccttgcctgcggtgggtgactgttgcatttctacgctcttgaacaatttctaaaattggttttaagcctttattaagcattggctttggagtatttatacgctgaaaacggctattaaagaccgatgaatttgcattttaatctatcagactggcttgtgaaaatgttcgtttcagcggcaaggagattgatcgccgcatcggaatactgaagttatttcttcatgtatctgattacaacttaatctatgataatagttgtaattgaatttattgtccaaaatgctcgttttaatcgtactatcaccagaagacatttaaaaagttcagcacacatggcaagcttgacaattatattcaaaaggttgaatggaagattgtaaaagttttctaatttaaatatattactttaaatgtacaaagtaaatccctcgctcagtaaggtccttttggtaactgcgcatcccatcccaactacacactacctgtatacattatgttactatagttagtaacttctgcatctttatgagttaattatttggtagtaaattataaaaccggttttctatttgactggcgagagtatagttgggaaataatttacgctgactatgaataaattatcgtaaggctcaaggattgttgtcaattattagcatttgattttgaagtataaacttattaacgttacactagatgcctttattgtagaaggcgaaaggtaattaagataggatatcaaactatccggctttgaaacttacaaagtcaagttctcattctaacttgctgtcttgaaatagataaagtgcgataaaaatcgcccgtgtcataactgctttgttgcgaaaagagaatgcataattgcgggcgacaatcggaagaagaggcatacaaaaacctatgtcgaggctttggaaagtcagttggcaaatatggaatcaactttggcaaagatcaaagttgccccggtagagaaaattccaagtctcttggctggcatatctttcaaagaccatctctcagcatcccttccgaataaaacaagctatgagcaagcggacacaaatgcgactagcaaatcactagtagaccttcctgtttcgttagaagtccgtggtagaaacacggttacgttttatggccctacaagcatcttcggaacttcatttacttcatccccaagacctccaccttctgcttccattgaagatacttatccgataatacattgcctacagctattcttcaaatggcagtacgctcagtttttgtttatccatcgcgaatccttcctcttcgaatattttcatcgctctaatgataacatgtattgttcagaacacctgatttatgcgttatgcgccataggttgtcggtcgtctgaagactcgctgcttgtcaaccaagcagatgctttttataaaatggcatgggatgccttagagagttatgggctcgagaattcacatataacttctgctcagtgcttactctgcctaggtttttataaaatcgcaatgggtaatacttcgcatggctggttgttatgcggtatggcatttcgcatgggacaagatttagggtttcatttggatccaagagattggcacattaataacgttccggttgtatctgaggaacaagctgctttacgaagcaggatatattggggctgttacgttgcagatgtttttgttagctttattttgggtagacctactacgttgagcaagtcagacacctctgttcctacttcagatgatttaccagacttttcaggcattgaggatttcatgttggaaagaggcggagcccacgcatcgtctattacaatttctcagcttctgaatctaatagtgagcttatccaatattaccgatgccattctactcaatgtcttcgcaccttacagtacgaagtacggtattgatctcagactgcaaaatgttggaaaatataacttggagttgatgaaatggcactttgagctaccaccgaacttaagttggaaaaaaaccgaattaagagattttggacaatctccggagttgtgctttctctgtttatatttttttttaataagactttgtctgaatagaccatttttatcaaagaaagggctttacgttaatgacatgactcctagaaacatatgcatagactctattgaagacgtcaaagtgctcattcgggcctacagagaaaaccttggtttgcatcacacccctctgattattgtctatgcctgtattgtaagctgcagcaccgtttttatgctttttgatggggctactcctagtgaaattgtggcattagaacaagatataaagttttttcttcacgtgctaactaaaatttcaaagaactgggatttagcttctaaatctataaaccttatacaaaagaaatctacgatgtatgataccaatgctagagcaaacgataccgatgttgatttttcaaatgataagcaaaacactcatgatttccaaattagccatgatgagaatttgattcaactctttaacgacgaatcaaacttcttcaaccttaatgatttgggtgatttccaatcaatttttggaggtcctcaattttaaaaaatttaccaagtttctgtacttccttataagtcatgcttttacctttttttctatttaaaagattttttttttacctatctatatgtgcatacggtgtaaaaaatattctatctatatttattttcagcttaagatagtaattattaatattatgagattattttaaagctctgctgtacaagctaattgactaataaaatgaataaatcctacttgatcctgtatgaacacgcaaataaagtaatcgtgctaaaacagcctcgtatgaatttgtgaaaaccccgcacgtgtagcaatctaactttttcacttaggtccaacacagaatcgtcctcttaattaaagggtatcttattgagaactcctttcttgatggtattggctaacctcgaaatatcggcagcattgttgtaaagacccaaagaaagtcgaatcccatctctatattgagaagcgtacacaccttcgtttttgagaaatgcatcccactcagggttcaagattttcgcaacgtaagagtgggtagaccttttctttggatcctttgagccgataattgttacaccaagcttggatagctcatcaaccagcgactttccaagttcacgaagatattgttctatattttcaaaaccgatgtccattaagaagctaaggtaattgttcaaacacagagtagtaatcagcgacttgttcaaatgttcaaatcttcgagccgtagaaaaataaataggattcagattgactagtaaatttgcatcaagattttcaatggctccagctccaacaattggaggtacatttttaagttgtggaagcacatcgggagcaacatataatactcccaaaccagtcggacagcttaaacctttatgacatgcaaatgcgcatgcagaaacatttaattcctgaacatctatgctgcttaacccaacctgttgggtcatgtcgactaatacatgaatgttttcaggccgaaatttattgcaaatgtctttcacgttatttagctgtcccgaatggaacatgacagatgatatgccaattgcttttgtcttttcatctacatacggttcaaacgttgaggcatcagcataatatatatctttagacggtattaatcgaacttctaaaccagcttcttgaagggaaatccatccaaagccatgattagggtgctctccatctaataataccacgttatcgccaggttgaaaatgcatagagcgttggaacaagttcaatccctcagtagtgtccctagtgaatgcaattgagtcagaactagacgcatttaaatattttgcaactaactctctagtttcttctgctttctgttgccatagtggttttggattaggattgtacaaaccccaatcaacgtattcatttatagtattggcaactatagagttcatgggtggttgaaatgaaaggttgaaaaaggttatgttttcatttttttcgactaatgggacctgcttacgaaaagcttgaatccttgcgatgccttctgaaacagtcatttggaaattattctgcgaacaattaactaggtctgagagccatatttatgtacttatttaaattgataaacagataagtaaaggatattcatatccgacacttatttatctttaggagatatatgtccgcaattgacggtcatcaatgaccatgttattcaaaacggcgaaaatgttaatatcagcatttttaatttatttgaaattgattataaatagtcccattactgagacgcataagccctttaataatgagtagcattaaaagtaaaacgatcatcgaaccctctgaaaatgacatagagaaaggagaggtcgacttcgtaagctcttcaatctctaactttgaagaagcatacgaggaaggcccttctctaaaacgagagtttaagtcgcgacatgtaaacatgatttctgtagctggtgccatcggcactggcttggttattggctcaggctcggcattgctgaaaggcggaccaggaagccttttcattgcatatttaatgaccggaataaatttgtatgtcgtacttatttctttaggagaaatggctgccttttcttcagatgacaaaggtttcagtggcttttcaagccgttatgtggacaaagctttaggatttgcaacaggatggaattatttcttcaaatacgctatcgtctacccgacaaatttaacggcagttggtattgtgatacattactggcgaccagatcttaacgtaggtatttgggtagccgtttttctagtggtgattttagcaataaacttattgcatgttaaatattttggcgaagttgaattttggctgtcagcagtgaaaattttagttttggtgactttaattattacttgtattgtgattacctctggaggaacacctgtgcatcacaaaattggattccattactggcgagatccaggtgctttcgcaccttacttagtagaggggtctactggaaggtttttggggttttgggcttgtctagttcagtcatgtttcgcttatgttggatctgaggttgtaggcattgcatttggggaggcaccgaatccagaaaaaactatccgaaaatcttcatttcaatctttgtttcgtattgcaaccttctatgttattggtgtgtttgtattaggactctgtgtcccatacgatagcgatattttgtcaagcaatgcttcaaaaggtaatgccgctgcatccccctttgtagtagctatcaaactggctcaaataaaagttatgcctgatgttatcaatgcctgtcttcttgtgtttattattagttccgccaattctgatatttatattggatccaggactttgtatgctttagcaaaagaaggatatgcccccaaaattctgatgcttcaaacaaagcagggaataccatgggttggatgcttagtaacgtcttcctttggccttcttgcgtttatgaacactaaaagctcttctgcaacgatctttggatatttcagtagcgcagttactgtattcggtaccatcaactggataaacatccttttatcttacatatgctatcacagagcaaccattgttcaacaaattcccacagaacgtattccttttcgtagctggggtcaaccatatatagcttatgcttcattaatattcactggtttgattacgttttttaacggatacaatgctttcattcacggatttaagtatagatcatttattacttcttatataggcattgctgcctatgtgattatgattttaggatggaagttcacattcaaggcgaagcgcgtaacatcatctactgttgattttagaaagtgatggatcctctttttgtactagcaattcacattatttcgtttagaataggaagcttactttaaataatcttgtatcggtgatcataaggaaagggcaagacacggcgacactagcgattgatgactgaagcatatttttgtttcgctagtttgattacagatttaatttctagagcaattattttctcattatttatcaagaaaccacctcagtctcgggtataggctaaacacataatatagcttttaattgatataatacaatttgattagcaaaattaacactagagatcatgcgtgaaacgcacacctagttatgtataataaagaagttatctaataaatttgaatctttttaaataaatagaaaatgataattttcacgataaaaaaaatactgtttacaaataattgtacaaatagtgatagataaagagttaccgaattattgattattttagtgcgcttccttaaaggaattttgtgtgagaaaaggtaagtgctaaaagttgtgataaatacaataccgaaaaatggggtgtctagtcaccaccagagaaacgcacaatttaccacgtagaaacttacttttgttaatgactttgatgaaataatgaagcctagaaagattattttaatgggacttcgccgtagtggcaagtcatcaatccaaaaggtggtgttttacaagatgccgcctaacgaaacgttgttcctcgaatccactagcaaactgacacaagatcatatttcgtatgttaggccgtttggcgtttgatctataattcttcattattttaattatgggtttgctaataatttgtttgtatatagatcattcattgatttctcagtttgggatttccctggccaagtagatgtgtttgatgctgcttttgattttgagagcattttcactcaggtgggtgcccttatttttgtgattgatgctcaagatgattatctcgatgcgttagctcgtttacatgtcactgtagctcgtgtcgtcaccattaatcctaacatttgcatcgaagtgtttattcataaagtcgatggacttagtgatgaatttaaaattgacacacaacgtgacatccaacaaaggacacaagacgaattggccgatatagggcttgaaaatgtacctatctcatttcaccttacctctatctttgaccattctatctttgaggcctttagtcgtgttatccagaaactaatcccacaacttcccactctcgaaaacttacttaatattttttgctcgaattctctcgtcgaaaaggcttatctgtttgacgttctttcgaaaatctacgttgcgactgacagtagtccagtcgacgtccaaagttatgaaatttgctctgattttattgacgttatactagatatcggttcaatttatggtcgctcctcccaactcaaacccggtcattcgcctgaaattcttgatgaaacttcttccgttattcgtctctccaacgaccttgttctgttcctgagggaaatgaatcagtatctcgccctcatttgtattgtgcgtgccgacaattttgaaaaatctggcttaatagagtacaacgttcaatgtctacagacagctattcagtccattttctcacctagaacatgaaacctttgaaatcaatcgcttctgtgttgattttttttacctccctgtacgaaatttggggacatgttttttttctacgtatagccttcgtgtatgcgtttgtactttatacttgttctatttgctttattttagagcttttagtttaatgatgactgctttcgtttcatttagtttgttgttatgctcctctaacggattcgttaaatttatgtgtgttgattgagtaagcgagtatcacgaataagtgggttttttattttttttaatgtaaaaacgtggactcaatgaaattcaataactaacggtattctaaatattgcaataaattttgatatgtgactgtaaacaagtgtgatttcttatgatttagataaaagatgagatggataaatgtcggaaaataaaaaacataaacatatgtcacaaagaaagaattcacatctcttcatcagatagtacgaaacaacaactgtggtgaaacatatatgaaaaattttttacttcttaaacatgaaattcaacgatttgaccatcatacgcaggttctgttggaaccttcaacactgaaagttcttttacggtttcgttgtgctcaactttgtgagaaaagccggtataaagcacacgggagggaacatgttcaagactagcaataaattcctcagcttgtttaaaggagaaatgagaaggatagggttcatgcttaagtgcatcaacgactacgacattggaaccttccatcagtttcttagtcgtaggaggaacgtagttacaatcagagatatacgacatatcgccaactcggaatcccatacaaaaataggtttgactttcctttccttcgatgaagtatacgccatgatgaacaggtaaaggagtaacagatatgtcaatatcgtcgagcttaaatggtttgtctggagaaaagacgtggaagtcaaaagtaggcacgcttccacctccagtagcatttttggcgttaaccatatagggaaatgacctttcaataactttataagttctttcagttaggtatattttgacagaaggttgtaaaaagcccaaggtccattctacaatgcaacaaacggttagtaaacttcaacagtctaaagtaatcaacaacgtctaaagtaaaaaaaaaatggtttataccacgataatcacataacaattaaagacctatgcgatacaatttaccattatctttagcaatgttcatcataaattcttacctcgtaaatcgtccattccattgatggcatctgcatgatcatgtgtcaagatgactgcatcaagatatcgaattttgtgctccacaaaatgtttcaatgcgctaacataaaaatgttttccacagtcgattaagatgttttttggacgatctccactcccatcatccacctgtaataacacgcttgtattaaaccggttatttttacgaccttctggtgttaaacttgcgaggcaagtacggcaagttggtttttcaagtgtcaaacaacatacattgggaataccactagagcaaccagtccccatgaaaagcagtttacttgttcccttggtcatcttatccggtataaaagagatttccgaataattcacctttcaatacctcgtcaataagcacacgtttcaaatgaacgactaaatttccaagaattcactacttggatttcttcccagttgaaacaaaactaggatatatgaaaaaaaaatcaattggtagtataatatatattgccaattgaatgaatgaaaaattaattctaaaatatggatagcgagtgtttaaatttgcagaaacatatttcaaggcctgccgcgcattaataatcactgaataacgaatgataaaaatcgcgtaatctttctaatatcgaattgtttagttttacaatatacggtttagcgattatttatttcctcgctgcggtataaaatcaattggtaaatgaaattcataaaataattaaattttaattgtacgttaagacaacgtaaatgcaaatacaaaacattggtaaaccaataattaaactttcgaaatatttaatttaaaaacatcttttaagaactagatgtgttgcgactacgaatgaatttctaaatactacgaaataaacaattggatatcaaatattttaattaattactgaattacacactcatgaattattataacaatttttgatatatttgtaactgctgattactatacattgcttgttgcagtattagtaaaacaatattgattttgaataaactttgaaagtaatggaaaaaaggaaaaaaagacattgtaaagaaaaattcctcgtaaaaacaaaagttcacttgctattttcaaagtatatataatagcaatcaattcgtgagatatcgaattcatttgttatatctagacactataatttaaatattctggattgttttaaaaattatagaagcaatgaatcactgtaaaataaaaaaaaaattgactacgacaaagtaaaataaattaataatatatacatatattaaatgaatataaaatacaaataaaaataaagaaaataaaataaaaaatcattcatcgcttgtaaaactttatcaagcataaggtatttgcgaagcgagtgtagtataatatacttgccatcatacagtttgagccgagtattttagctggtagttaatagaaatcaccaagaaaacctaaatcctctgtttatgacttttcaagaactactattcccaagattaatgtcaagagagttcatatgtattccaaaatatggtagagcgcgttactgaatttcgagctggttgagtttaaatatttgtttatgttatggtggaatctttggtaaagcttcaaaattattgtactaaaaaaactaaaaaagtgaacctaggatactagctagcaaaactactttctcagaattatgcaaattatttggggttattcattattataggcgctaatctgccatggacggagctgttaaaaagaaacgagaattgagtgtatttaaaatgaactactttccattaaattgtttctttgcgtaacctcagttaaaaaaaaaaagctattcaatgtttatcgaataacgtacagtaagacaatccgctacaccaaccatacttgttcaaatatggatattccaacctttgacgattatttcatttcgagcaacgtttacagtatatctcgaatcgtttacctttgcctagaagttaccaattgtggaaaataattttaaatatatgttgttctggtatccttaactagaaggtaagagagaaaaagtgtgaaagagtggaacagttttgagctgtatattgcataaccagttaaaaaacaatccctctatctttctaaagactttgtttggaattagcaaaagctgaaatttaaaacattcccaaatgatcgtttataaaccaaaattgttactgattgtttacaaatctaatgttgatttagtccaacgagttatttcatatcagattgattgcttgcgaaaatattgcaaactggcgtatcttacacaatcgaaccatgttataaagttcattcacaatcaataaaaaaaaaacttccgcgatttaataagaaatcctaatataagggggccatattcatgacttcaacatgggcatacccaaatcatcaatttatttttgtatactattattctgcattatttcattctatttacagtcttctaaagatgggcctaaggaactaaaagtcaagtatgtatttctaaaaaaagccacagcaaagcaaagaggagagtcatccttgacagattcagattattttcctaagcagcccaatatgaacgctactttgtttatgctttgccgtaatagagacattaaggacgctcttgtttccatacaaagcgtcgaggatcggttcaatcatcgctatcattacccatggacatttatgaatgatgccccttttactaaagaatttataacagctacttcaaaaatggtgagtggggatgctacctatgtccaactcaacaacgaagagtggggaattcctataaacatcgatttaaatcgtatgttgaaatcaattcgggatatgaccgatgacaaagtaatatatggattttcactgagttatcggatcatgtgtcgcttcaattcaggatttttttatcgaaacaaagccctttcacattatgattattactggcgcgttgaacccggcgttgaatattcttgcgatataccttagtaagtgcacaagaaaaattgactatttaactcttgtttttgtaatatgatagaattttgtcactaaccaattctttaagtgatccttttcgaaagttgagtgacgagaataaggcgtatgggtttgtcatatcaatgacggattattatgaaaccctcccttctttatggaacgttactcgagattttattcaccaaaacccacaatatcttgcacaaaataactccttggattttatcgttaatgaccaccaggggttaagtggtgactacaatctctgccatttttggagtaattttgaaattgccaatttaaatttctttcgaagtcctgcatacacagactactttgcgcacttagataaaaattatggatttttttacgagcgctggggggatgctcccgtacattcactggcagcatcgctatttctgaacaaatcgcaaatacattactttgaggactttggttattaccatttaccctggtaccattgccctacggatgtacagtcgcatgcgacagctagatgtctatgcgatccgactggtacgattgattatttacccttctcttgtgctattaaatggttagaaaacatcaatagttaaaatacatattacttgtaattcccgagattacctattttatttttgatatttgttttaaaaacatatttattgtggacataaacaaaagctgatcgttaactaatgatgaaaacaaaagactgggaatatcaagtattgacacaaattttttaagttttagaacaatttgcaaatattgaaaagtgtggaccctataaaataagaaggtaaaaaaaaaaactgaaacgattttaaaaaggaaaaataatataaaaaatctaagaatgaatttaggaagctatcaacaggcatctgactttagttgccaaattagtaatttcttgttccttggaatcgttcgttcgtacacttgccaacaaacttaatatctgaaacagtcgagcgaacacctctcctgcattatctaaagcattttcagcagattcggcacgcccaatacagatttgtatccgatttgcaattggcaaaaccatataatcgcgaaatgtcatcaatgcaagacgatggacatttagtttttccctatttgtggaacaaaactcatttacttcatagggtaattgtgttttttcttgttcatcaaacaattttgtctttataggtaaaaacacaccttgaacgtatggcaatacggaagaaaagaaaaacagccatgtttctatgatacgattcaaaaataattcttctggaacaggcgataaactgtccgaaaggcacttggtagccttacggaatagtgtctccaagtgtccaacaaactcattcatcttcgtatcacggataagagcttgtaaatgtaatataagaattccattcaaatcttcaagagaatagtgcaaagcctcacccgaatataaactacaaacttcggattccacaataagccaagtttcatccgcggatatgggaaccaggttaaagcgaccttctaaaggagagcgaactttgcccaatttagcaaatgcaagagaggctgcaccgaagccattgattatttgatttgtaacaagtgattgtgggatggaagcgccaaaaattcccccagcgtctcttcttcctcttaagaaatttcgagacccgttgagcgttttctgcaaagcagaaagatctaaaccatctttaggctttttatgcttatgcggagagaggttaagcagcgataattgagttttcgtagaaatactttgaacttcggcattaacattagaagggctagtaggcgttaaaacgttcaactttcctgggcgcttggaatgcttactccaatgtgtttcctcaaaaaccggatgactgctactttgactagatcttctgctaaatggccattgtccattaaacggacttttaatgttttcagtcgtgtcagagtcgccaacgtttgattccttagtagtaacagtctccaagtcttggttctgcccattttccgacaacgaaatagtgttagaaacactttcaatgctagttttagtgttttttggaatccaattaatggatgaggcgctcgaggtagatgaaaaagatcccctccctaccatctttagtaatatttttggaaatgtactgagggtatccaagaaatttgcttttagttacgcgaaatgcgattcttcaaaataagcatgagatgatattcattgttcaatcattataaaatgattaaacttacttaaaaaaatgatattttttagaaagataaaaaattttgtttatttttgaatatggtggtattttgctaaagtatcgatgtgcgccttaaattaagataaaatatagaaacgaaaaattgattaagaattccttataacgatatcgttctaatgtgaattgaatgaatagcatgttgatataataattgtatgccaaagaaaaaaatagttaatgctaaaagaaaacatggaatgttatttgctatataactttttaaaagttagtaatagaaaacgcagtaaaaaaacattgattttgtgaattactatcatttgacagagtatttacggtacatattacgacaattcagtttagtagatgaaaaacaacaatatatatctaattttctaacaaaaaatgtaaacaaaattgattatgaaaagaaagggaataacgaaaaccagtatttacaatgtaaagcttccagctaagcttttcgtaacccccctatcaaaaaattttttggttggcaaatgagagcaaggttaatatatgttttcgaggaacaagatttctcgtaataatcactttttatcgcactatataaccaatccattcaatgaccaagtctacgaaaacatacacttttacttacttaaagccttcaaagtgctctccatgatatccaaacccttagcaataacctcatctttaacattcaaactaggaaggacacgggtgttgttgtttccacctggtaagagtaaaagaccttgttgacgagcaagctcaataaatttagcagggggctcggtaaattgcaaaccaagaagaagaccacgaccagcatatccacgaataagattagggtatttggcaacaaagtcatcaaaacgtgaagtaagagccttgtgttgctttctaacgttttgtagaatcttggatgaccctaattcattaacacagaatgtgcctacacggcaagcaacaggattacctccgaaagtactgccatgttcaccagggtgaatttcagcagcgatcttactggagacaatggtggcgccgataggtagaccattagccaaaggtttggcaactgtgataatatcgggactagcgacatccttaacgatactatgggcccaaagatcaccgctgcgaccaagtccgcattgaatttcatcatagattaaagaagcaccaaccttatcacaggccttgcgcaaagcaatcaaaaattcaggcttggcaggacaaataccaccttcaccttgaacgggctcgacaataacagccgcagttttgtcattgacaaattgctctatggatgcagggtcattatagacggcttggacgacatcaggaagtaatggttggaaaccacgtttatatttggggttcgcagtgatactaagagatcccaaagaacggccgtggaaagagttattaaagtaaacaatttgactcttcccttctccatacttctcaaacgctgccttacgagcgaacttcaaggctgtctcattggcctcagtaccacaattggcaaagaaaatttttgtggggccagcaataccgctattttttgccaaagaattattaatgacattagatagctcaatggcaggctcgttgtagaaaaggttgctactatggactaatttggagcattgatcagcggcaagtctagcaacttcaggatgagcatgacccaaagatgtaacagctacgccagaggtgaagtcaatgtatttacgaccttccttgtcaaacaaataggagccctcacctttagcagctacgactggatagcgtgcataaactgatataatattcgccccttccttcttgataatattgcaactggttgtatcaggagttggatctttgtgggtaagctaaacttggttaataagcagtttaagaaatattaaaattagtactgtatgaggcagtatgaaagcacaaatgaagatttattttgttgggtcagtaagaagcattctcaacatcaatacttgtctaaaaacaagagcaaagtacagaattctcgaaaacaatcagaattagatgatagtctaattatttgccatcgtatgttcagttgcacttacaatgcatactctatcaacaaacttgtacttacgctgacaaatcgacgaaaggcgatttgggaaccagacgaacgaacagagagaagtgatcgtctttgaaacattgtaaagcagttacgggcttattaggggggtttggttctggttatgtgtttttatactgatatcggaagttcatcgtaatcgtgactgatttagcgagatttaaaacacatcaatattttcatgacagtcgtctaatctatgtcggttatctttatcgaattgatttagattgatgaaaaattaagccatgacattgtcaaaagaaattccattcacaagaccacctttcatggctgtacgcacacgagatgcaaatccttgagggtctttatgcaaatcagccgccgcctctaaaagatatcgtttgttagtatagttaaataaatctagaaaatttgttaaggagcaaaccagatttcttatattaaaattgcttatcataatcattgtcctcagtaaagaaccttataaatcccataataaaggatcgtagaaaaaatgagtatcaaatgatagttaagagatgaataatcatttccttgtaatgcaataacaagaaatagttcattgccccccaaaaaattgtaattaacctacctttgttgagtggatcttctgcgtttggtgacaagaataaaaattgcaatccaaccaaaatagaattcaaattcaacactggattccaatcctgacgcagaatattgaggcatacgtttccctcaatatcgatatttgggtgatagatctaacagtaggtcagaacgaaagggttcaaaacatgttataatggttattttcttaaatgcaaaaaatataccataagctgcaactctaatttagagcatgactgacatactttgtttagacatttaaccttaggaggatcatgaggataattatcgtcgatttggattcgaaatttaaatttcccacccttgtaatacccttttcatgttaatcaaaataaaaaataatagtctcaaaaagtctacaccaaatattctttcatgcggaatcacaaacttaccttcgtcaggccggatttctaaatgtagcacgttcaattttataggatctggccagcttgtagacatcgtagatgggatttctaaatctgtaacgtctaaattcatcgaaaatggttagtttcgagtaaatcgcgaaaagttatcaacatgatgagtcgcacctttttggattcggatttgtgctggactaatccctgacgcatttttctctttttgagcttctttcttttttaattcccaaatttttctcatgatttacgcgattcttgtaataggcagaaggatggaaaatgcgcttacaattttgggtataaacaatactctcatacatcattaaaaaatagcgaaacatgtagacacctaaagtgctaataatgtggcattttatattaccttattcaattgcaataaccaattttaataaagtcgttactctacgcaagcattcaacaatattacgtactggaacactgctatgtaaagttatatacagacatcgcaggatgtcgtaaatttagggaatgggaaacggttatcatagtaatgaaaaatagttctcctaattagagaagctgattatattgactttacttaccgaatgatttaatatattcctttactattaattctaaaaaaacccagacttacaacctagtcgttaaattgtaggaaccgactacaacttcgacagctgtttcaaagcatttgaaaaacttacaaagtgtttaagattgaatcttttttttaacctgtactatatttttctcttgtaattagctctattttccttttcactatgccatttttgaaaccttcaaaggtttcacttaaacgaattctccaaggaaatccacccaaaccaattggcttaactgagtatggtcatttgctgaggctcgttggtcttcgtgaagcagactctaaggaagagaatgaaagaacaattctaaaactcaacgaaggaatcattcaaatgcatgcaattgagagacttgatacatccttcattaaggaaccatttcgtactttgaatcatgctattaatgcggaatctctaccatcattacccgatcaagagccgtggaatgtatttcagaatgctaagaaaagagacgggcagtactttgccgtttattctaagctaaaagatgattcctctaatgaatctccaaacaagcaataaggttggaaaatctacgttctgttaaaaaaggaaggaatgaaacaaatagggtataaacctttactagagcggtgccttacatatagaacatgtaacaaactctcgtataattattcaaaaaattgatattatcaaaaactaatagtattttccacatagcttatttcttttttgcagcggcggcggcagcagcagcggcttgtttttgtttcgcttttttgctagagcgatacattatgtaggcagagatcccaaaaatagctacattcattccaagaggggtgtatttttgacttaagtgtccgtaaagtgcaagtgcctttccaaagacccagtaaaaggacttcaagggcccgttaacagagaaaaaaccttgctcttttttcatacttttgaacccgtctttttcatataaggcgattgccttgttcttgggaagaacctgaggagaaacacggtagaaattttgattatcgatgaaataataagaaggaatccgagaaatgagtaagcgtacagaaagttcgaggctactgctcaagtaaacacgggcaaagtggacatccggatatttttcatgaaaagcatgcgaaaggtcctaaaattagttagtacagattcaattaaatccaaagatggtttaatttatttccgaggctcaaaattcaatctcataacaagagcatttggacaacattaaatgcagtccattacttacgttaaaaagtagctctccaagagtacagttagcacagccttcagcagtcaactgcacaaaccatttgccagattcaatgacatgatcccaggttttatctgaaagttcgacaacggtggaattgtcaaaagcgcaaactgggtctgtgttgtatttttcatacggtacctgtaagacattcatagcttcaatggcagctgattcatctccttcacaactataagctgccacgaaatgcagaagttcaaatagaaacacaaaaaacaaattaattttcattgaagctgaataaggtaatgaaaaatattttctctgctgctttagcaataataaacacgagttatgagatgattttggatccaactcaaaatagttggtagctgtgagaagaagatgctagacgagctgatagagcagaaacgatggccgcacaatacgcagtaaacgtttaccattcaaggatttaaatttcatattaactatactattataggaaaatccaaagcttgttattgtaattgagaaacactaagcatcaaccctgataaaatattacaataacgataatattcaaactcagaaagagactacgcttctagtgaagccttttaattaaattttttatatttttttatagaaaaaagtcaatgctgaatacttcgtaattcttgttagtaatgtaacaatatctcgtaatgaaaagctagaattgttcaaattgcagctagctaagccttaattaatccactaataaactcaataaattctttttatgttgattgaactaagtgagagtttaggtattattattccttcgttttcgtcgagaattcggacccttgtaacaaatgtgctttcatagattttaaggcatcaacagcaatcgcttgcttcttggggaaaagtgtatttcgataatatccccttgtcactgagacgacatcaccttttgtaaagttagtagtttcctacgacggctaaaagaatgcatttcttataataaaaggatgtaaccactacctccctattataggtttgaaatgaagaacattataattatgaaaaatttagcataccttgccttcctagctttgaaacttcgttgtttaacagttttaccaaaaacggttttggctgtttacgaagaaacctctaaataactgtgtaagtaacggtgattttttttataagcttgacataccagttgcccataaattctttgaaaaggtgagactgctagttcaagggaattgaagcgaaaaaatcgagttgtcggtttcataatactcatttcaattaaatgggtgcaccaagaaatccgtcaagaaagtttttacaaaataaaaagaaaagcagcttaaataaattctcaattgaatgtagaattcaaaaaccgttagtttagaggtctaagacgaatcttgtagtgtgaacctttccgatgattagatttatagtttcttttaattgttatcaaaataatatactatttaggcgcgatatttgtgatatgaaaatggtcaatttgaaattgagcgaagcgcgattccaagctgtgctgcgcgcaatacttcaagatctaccaatatatctcaaccagtaccaccaactttatttgtagacatttcaacgaacccattataaaaaacattgctaatattagtgaattaaaaagaataacaaacatcctgtttttctgttcgaaagttgggccgctagtaaaactatactgaaattacaattacgttggttaaattgaaacacttggaagtggatatttagggctctatgaacggaattaatactgctaacgaagaaattacaaggagcttggaagagtccttaaatatttgcaagcagtctagtaggctgatgcaaagaaacttgcagacaggacgattgatggatgcatttcgtaattgcagtattagtctcgtggaaatgagaaattctgcacttactccaaaacaatactatgagctgtatatgtttaatatggaaagcttgcgtttacttgggggcacattgctggaaacgcatctgaacggtactcacaacctaatggacctttatgaacttgttcaatatgccggtagtattgtccctcgtttatatctcatgataaccgttggaagcgcttatttggaaacgcctaatgcccttgtacgtgaaattatgaatgatttgttagatatgtgtagaggtgttcagcatccgttaagaggtctttttttgcgccattatctgcttacccaaacaagaaaaggattacctttgggatcagaagatgaggaagatgcatctcgcaaaggaaccgtactcgattctgttaaatttttagttatcaactttacggaaatgaataaattgtgggttagaatccaacatcttggtccaattaaagaattttccaaacgtacccaagaaaggaatgagctaaaggttcttgttgggctgaatttggttcgattatctcagttaaacctcgatatagacacttaccgagatcatgtccttcctgccataatcgagcaaattattgaatgtcgggactcacttgcacaagagtatcttgttgaagtaatttgtcaggcgttttctgataatatgcatcttcaaaccctcgatacatatttcggtacggtcataaagctttctccaagcgtaaacgtaacccaacttgtggtcgctatgttgaatcgccttacggactatgtccaacgtgaatatgaatctgattcttctaatgaagatgaatctgagactgtaaccgaaaaattaggagacataaaaattaatgaggaagtacagcaaaaagacgagcaagaatgccctggagataaagtaattcctccagaatatgctattcaagaggttttatggtcacatgttgttgaagttattcaatctcgtagtggtcttccactagattgtattgtttctatactttctagcatcctcaattttttcttgcggtgttacccttataaaccccagtatgcagatcgtgtttttcaatacattaacgaacatatcattaaccagccctccttacgaagcgctcttcatgaacgtccattacaaaaaagtctttgcgcaattttattgcttcctcttacatatttcccttccttttcttactgtcttgagctacagaatttccttcctgtatttaatgcgcaagatccaaaccttcgttacgatattgcaagaatgattgttcaaaagataattgaaaaaggccactcattaagtgagcttacagaagcacaagagctactaggttttgtgtctgtcattattgaaaaaaagggagttgatagccttgatgacttacaaaacgttgctttgatggttcattatttgaataatgatgacccgcaaattcaaatagaggtactatattttttttcttactgatttactgacaacttagatacttcgatccttgaaagatacatttataaaagccggtgagaatgtcaaatatcttttgccggtcgttgttaatagatgcatattccttgcacgaaactttcgaatatttaaggtatattttgtgttttgcaagtctttactaacaatacatttagtgtatggattgggctgagaaagttcgtcttctttgggaatttgtaaacacttgtatcaatgttctttacaaaaacggagattctttagagctgtgccttgcattatatttaagtgccgctgaaatggctgatcaagaaaattatcctgattttgcttacgaatttttcacacaggcgttttctatttacgaggagtctgtccttgactctgaattgcaatatcaacaattactaatgattatcgggaaattacagaaaactcgtaatttctctgttgatgattatgacacgttaattacaaagtgcactttatatgcttcaaagcttttgaaaaagcctgatcaatgttggtaagaaacaatgatactatatattaaagtgattatactaattttttactttagtgggatttacttggctagtcatctatggtggcaggtcgcatcaggagaagattcaagggtaagcaaattgtgatttctcatctatatttactaacattcctatagccttttcaggatccaaaacgggtactcgaatgtctgcaaaaaagtctcaagattgctgatgcttgtatggatcaggtatgctcataaatttaaatttcgtttgtaaaatccttttttcacatgttattctcaggacatatgttgttattaacttttttttagcttactagcctgaagctttttatcaatatattggaacgttacttttattattatgatcagcattgcgaatctatcattgccaaacatataagtggactaattgaccttacagagcagaacatgagatccattttaatatcctcgcctgccgaccttattgctagtgatccaagagcgtatgctagttcgatctgggaggttgctaatgtatcggtaattgattctcttaaaaatcatttagaaagagcaactgcttacgcagagaaacgttctgaagatgaacgttggtctagtatttttcaatgatttctcgtatgcgtttatatcatgtcttactccctaatatacttctaataaaatttttgtattactaatttattcatttttctcttgacagctatatttcaggttcttagatttttttctaatagaaactgcttaccaaacttttttttcaactcgtacttgaagctacgatcatagccacttcagtccgtattcctaatatattgaatttttattcgaaatttgcatttgtatgcctcattaattaaaaaaagaaagaaaagaggcttaattggtaaaaaacaatagtgttattgtcttgaaaaagtacttttcatcaggcattgcaagcacttcgtcaaacacctacttctatggacgtattacatatttattgtaaagaactacaatagacttaaaatgagtgacgatagatttgcagaagatgaaattatacagcaaagacggaaacggaggttggaaattttaaagaagtaccaacagactggcaatggccattcggatttgtcaattccagagaaaaagctaaaagaagatgtcgaccaagtctctacaacgaaacctatcgaagctgtaccaaaaatgaaaaccaatgcatctaaaattgagattaacaaagaaggttctaattctaatactaagcttgatgtaactaatagtactactagtgattccccctctatcaaatcttctgtacaaattgaagatactgaagatgacatgtttgcagattctccttcgccttctgttaagcggcaaaacactgggaaaggtatttccactctaactaggagttttgcagatatgcaggataattgggacgatattgaaggttattataaggtagttcttatggaggaattggattctcgttacatcgttcagtccaaccttggtaaaggcatgttctctacggtggtcagtgctttggatcggaatagaaatcaaactttcgctataaaaataattagaaacaatgaggtaatgtataaggagggactcaaagaagtatcaattcttgagcgactgcaagcagcggatcgtgaaggtaagcagcacataatccactatgaaaggcatttcatgcacaaaaatcatctttgcatggtgtttgagatgttaagtcttaatcttcgggacattttgaaaaaatttgggcgtaacgttgggttgagtataaaggctgttcgtctgtatgcctatcaaatgttcatggcattggatttgttgaagcaatgcaacgtaattcattcagatatcaaaccggacaatatgctggtgaacgaaaaaagaaatattttaaaaatatgtgaccttggttctgcttcagatgcctctgaaaatgaaataacaccgtacctcgtgagtcgattttatcgtgctccagaaatcagtaagtctaaataaacgccaaattgcttataattccaaaaatatggaaattgaattcttcttctcattacttttgtactcttttttcaagatctaacctttaaaatagttttaggctttccttattcgtgtccaatagatacatggagtgttggatgttctttatatgagttgtatactggtcaaatactatttcctggccgaacaaataaccagatgcttcgctatatgatggaatgtaaggggaagttcagtcataaaatgttaaaaagaagtcaatttttaaatgaccatttcgacgcggatttcaatttcatacaaattgatcatgaccccattacaaatcaagaaacgaggaaacctgtaaaattctctaagccgaccaaagacattcgatctcgtttaaaagaagtcccaacttcaactgatgaggaatttataattcgacaagagcttatggatcttttggaaaaatgtttggagcttaatccagagaaacgcgtaccgcctgaagtagctttgaagcatcctttctttataaaaaaataaactgcgggttcatgggtaactatcaatttagagtgaagcagacactgtttcttagttacgtgatctctctggtcaatcaataccaatcaatgtatatattttatctaaccaagtgtaacaattttgaatagtagaaacgccaactggtttgttgtttgacttacaaatctatgtggttttcaattttctttctccagtgtaaatagtgtttgtgtcgaaagagtctcatactcgttcaacaaattagatactaatgcaaaactaattgcttcattttattttatcatttgcgaaataaaaccaatggtaacgacatttcgataactgcgtagatgtcacatatgctgtcaatggccgtggacattttagcaattgccaacattcctaacaaaatctctgtgacccaaaattcatcataaaaatatgagagatcgtttaaaggatcctgtaaaaatatttgaaataaataaagggaaacgccctgtacacatagcggcaccaatggtgcggtattcaaagttaccattcaggcaactagtgagagattataacactgatatagtgtatactccgatgattttagcaaaagaatttttacatcctaaaggacgttattttgatttttctacaaacgatgcagatgcaagcttgattctacaattcggtgtggatgacccagtaattttggaaaaggcggcacaacttgttggaccctatgtagatggtattggaattaactgtggttgccctcaaacatgggcaatacaggaaggaattgggtcagctttgttggatgagccggaaaaggttcataagttagttcgtgcggtcaagtccaccttgggtgaaagcttctgtaccgaagtcaaaataagaattgccaaagacttaaataaaactcggcacctgatgcaagtcattgaaaaatctggagctgatataattactgttcatggtcgcactcggcaagatcgctcttcattccctgtcaatttggatgcaattcgagaagttcgcccatgtgtccaaattcctgtcgttgcaaatggtgatgttaaaagtctccgtaagggtcttgagattgctaaatatacagaaacccaaggcatcatgtctgctcgtggtttgttagaaaaccctgcgcttttcgctggatatgaagaaacgccttggggctgcgtggagcgatttctttggtattctacatcctattctctaaatttccatttattctatcaccatttgactaccatgatggggcaaatgactactaagcgtgaaagaatgactataccgaaagatagttttgctagtgtcatggactggctagatgagcatttcgttgttcggagacccgatgaacccatgtttggagaatcggtattgccttgtcgccgctattaatctcaactcattgtttgtttattagttggcattgtaaatatgaagtgatttctgtaatcaatttatgcagggatcaatcgatacaattacttcaatttgccaacgttttatagttattgttttttttaggtgttttagaagtctatggtttatcattgtattttatctgttgttctttaccagaattagaatcccccgaccttgttcattactactttacatttttagtcatactcatttgttacacttttcacaattcccttccgtctttatctcttgaatattatgaattctattacacagtacaatcaacgctatctacattactttattaagagaaattgtactcttgaaacagcttgcgaaactgatatctcgataattaaaaaatgcgttttttcaacaacggcatttccttgttttatcaattgtttgtcttatctccaccatggcatagcagaattggtatcagtaaaaaatattgatcaattcatatttctgtcaactgtgttataaaccagatagcataacggacttaaaatgaaattgtagagatagaaataaaatagaatgaagagaaaaaccgattaaaacgaagaagtgaatgcatgacaaaatattagtacattttctttttaacagtacgaagctaaaataaaatagtagaaaccacaaggtaaagatgaagaaaatgcatcttagaggttgttaaaacttcacgtagtaacgcatccttcaaactatactaaatagtagtttccagcctctaatgctgttcagcaaagattttgaactcgaacttctagatattagttacagacgtctaatctgctaagattaaaaaatttaagaggaaaatgagaactatttaccatggttctatatgctgttagtaaaatacatatccatacaaggattagcaaacttataacttacgagaaccagaccatcagagtactcctcttctgcaaaaccgcgatcatcgtcagaactgtcattaccatcttcttcttcactgtctgaaaagtcttctcgatctgaaccgttaataaaaaaattagatcgcggatacttgttttcatttccgcgcgaaacccattcaacaacttcatcgtcgtcatcgtcgtcctcatcagaactactaaattgattggcgttgttatcggatatttgctgagacatgtactgagcaaaatgatcgcgattgtcttgatcactatcgttagctgattcaaaactaagtcgtcgcgacatctcacgagacagcgggtcttcatcattaccatcatcttcgtcattagaagacgaattatgcgatagctcacgatgaacttccacgacatcgtcatcactgctattgctttccaattcttgctccagcgcaaactgcatttcaggtaaattgttggcgtccaacatctctccttcgtccatgtcttccaaatagcccaccatcgagggttccaagcctcctaataattgattatcacggttcctcgtttctactaacgtcttatttacaaaattttgccatttttcgtcattgataagatttagcaattcctgatcaaaggtagaagaataatgttctacaaacttcacaacttcgtcagcaattatggttagatgacccatatatccagcccgaaatccgctaggtttagctacctttttatcattcaattcttggccgtacacaatcttttcagtgattttcccttgtttaaacatatcgacggcaagtgcatagttttgatctttgtccataggagcatttaacacctgctgaacaacatcatatacaacgttatgtaaaaaattgttccaaggataatcaaagaaatgatcaagaatagtcggaattacattattttgaataaattcaatctttagaaaatcgccaataacagggagctttttagcatcctcaataacactttccggaaggggttcgtaagaagtatcagaagccgcatcatcgtccccatggtgtagtgctttagcggtttccataacgtccttgtattcttcttcactaacgggttcagcctcggacattggggaatcagtagtagtcaaattaaggttatccttagtgatttgcggagcacgaccgtgcatatcttcagccccgttcatgtcttcagtttccttaaaatctttagaatttttatcggaaaaagtagaatcatcatcgtcctcgtcgctcatgacaagatcacgtgcacagctattatggcggaaaagataatcacgaagatggtcacgctgcattaccatggcttcaccattaggatcgctaagaagggacatattactacaatgaagcaactcggcgtaaagttcacaaattcggaaacgttcaaaacctaaaggcttgatcttaccaaaactggtgggcatgaggtcggactcggtggaaggtttaaggaggattttttgaaagacaggaattttttcggcgaaaagacgcaacatggtcccaaggtaaataggatcacgggtagtaggaggatgcgtgtcaagaggcatttgcaaaacgggtgtaacatcgtagtcactgttgttcttacgaattagttctattacgatgctgacgccattaataagagaagtggcagagtgaggagctttagaatcggtcatgtaatcagttagtgtagttattgtttgtctggatactagttctcgtgaaagggagttaggtccaataactccgggttcattagaattggcagaaatagcgataattgcttttataacatcagcaacagtaaactggacgtcgggatccacatatgggctaagtagacgcagtaaggattgtattaatccctgcgaatacaaccagtcagcaattccaatagcagtattgcaacgatccattgaaatgaatttgagcaacagatccatgattgcgcttgtttccgcatgacggaggatcttttctacaaagttatcaatagattggataaaggcaaccgtttcttcggtttttttatccagaaaatgttcattgacctttgcaaagtatgatgcttgcaatgggtttaatgggccctcgctatccaaaaaggaccaaagtttcaccatcaatgtcttattttccacacaagcctcacagatggaccaaacgtcgctactgaggatttcactcgctatgtaggaaagtctggtatgttccggctcttcataaccaccatcggcagaaggtatctctgtttcgtcaacctccaaaatataatcaatcagctggctaagtacttccggcttgcaaaggtattctaaaagtttggggttgtggcttttacattcgtccaaaaccccattctcttctaacaactcctttaaattaatctcatcttccggtttatccaaaatcgcctcaatggcgcttgagctttgaaatccaaatccctggcccaatctccaaaacatttctatcacttcctttaaaatgtatgtaagtcaaagctatgtttatacttcccaaggcttaaacggcgaagctcttaggtaaaggcttccccttttgcgttcttgttttacggcggtactcttgagccgtgcccttcactgtatagataatcaatgtctgcggttttaaatatgagtatcaaagagtctcaattttgaagtttttcctctattactacttccaaaacagacagttgcggttttaagctgttggcgaagggcagataagtgtgaatggtgaatcctacgtagttcgttcttccatatggagaggtgggggaaagccaattgtctctttactgcggctttaggaagcgatgtaaaaacattggctattctagtgtaatgcgcaatcaattataccgtggaaatagcgtgttgcaatcaaatttagggatatggtaaacggtggtggggttgcttgatacatattatattttgatacacaggtaatatgggtaacaggtaatgctgatattcttatacaaaggggacgtttggcagctaatcactgaaaaagctcaatacttaactgtactaacgaattccagctaggctctatctagagtatgtttattaatctaaaactttcttttggaaaaatcagcaaatctttttgtgctatgttgtatcataagatagcggatagataacagaacatgtgatatataacgatacggaacgtactgtattattcgatatactgaagttgacattacagtagttcaccagttttctgttagcgaaatctataagtatcacgttgtaaatcggtagatatccttagcagataatttcacaaaagaaaaattttagcttaaaagttttaaaagagtattttatttacggttataaaagctcctaaataggagttaacttaactctcctatactgcagaagtcaatccatggcaaggactaatctgtatcgataatgcatttactgacgatcaattgactgtattatttttcgcatttccagatataagattgcttcaaagtgttcgttatagcatataatgtaacttaggaatactgctagtcttcttaaaatgcggatgttagaagtaatctacctcctaaatcagctttttggttcctatttttgaatattctttgttttaagcaattgattcgaaatttttcaattttgtaattctctgcttagtataactttgtaagatctgaaattgcgataatttgaaaggaccttgcttgtttgtttacgcagttatatcaaccggcgcattttttgatcaacctctttttatcgctcattatggaaaacaatcatcatttggctaaggattctttggatgaattgaatcctaaacgtggaaaaggcgagcacgaaactcaggtctcacaatacactgtggtcgaggaagccactatacctcagtctttaggtaagaaaaataccctcgttgggaagaaaaagaacttcatattcaaaaagatagcaattttaacgtaaaagtgaaaacttccagacctgctgatcataaagtgatggaagcttctaaggttgctgatactcgtacggcttggtcgacaaaaattccagcagtacttcttcctgttttcgtaataaatattgctttgtttaaatatctcgtgtttgcaaacttttcaactaaagatcgggtgctatttggattgggaaatggtggaattaacatattttcgatgtggcttttactcggtaagtggactatgtgattactatcagtatgcagctgctaattctatagcaacatatgaaacatggttcaggagtatcaaggaagttattgtcgcttgcggagcaggtataagatcttttccccaaaaacggggagtaaatatgctatatgctattctcaagttgacttttgttaatgcatttgccattcccctccttatgttttttagaagtcattttgagcaatggagactgggatgcccgttggtggagcgtgtcattggtgttatgctaaacgtggcatattttataattgaaattggttcgttcttcaaaattctgataaatgctaactttacaagaaaatcctggtttattcactagagtttttaataagtactgtgattgcttatttgctattaggggtatgctgctaaattcatcaatctcgatgttcattttccaattcgtctcacttaccaaactagatatcctaaatagaaactaatgagttttgaacaaatgcaatgctgagaatgttatccgttattttttggaaaaggtttaatatgctacatgtgtattcaaacgattctatattgaaagaagcgtttgtatttcgattactatctgctaataatcttcctctttagaattgtcaaatttgataaaactaatgagatcataatagcgtgaagcacccttgcttgcgttatttctttttaaaaatttgtcttaattgccagtcgacacctttaaaacatctttcgttgagtgttgtagtttttggactgtaaaggaagaccctttgcggtgatttaatgttttcaaacatttgctaaagggctgttaaaatgtttacgatattcaaatgtttatttaaaagaaagttttcttatttgttcatctatggggttggctcctcattcgtataatacgctgaaagcacattaaagtctctggatatcagcagtttcatatgattaattttcaaagatccggtttatgataatcatgaaagcaacagaattctttgtttgttatgggaatgtatttgttgatgattacttttttttccctagtcaaatagttcaataacggttgatataccaattattagaccaacagacgaagctgaaattcaacaatggttaactcattccatttcggaccgtataaactcctttattagctactaaattaatttttaattttggtcagtcaatgtgaataggatatttctttttaactcattaagcacacaatgatttcttggttgtttactgaatagtgcaaaataaagtcgtacctaaaaatatgttagagtttgctaattgatataaaatgtaagctacgcagtttggtatctgatttaaggatacgtagagctgcggtgagttttccttgtggtctattatattacaatacacaggttgtataagtagcaactgagtataggtattgtattaactggattataatgttacctatcactaatatagctcataactgaacctcgttcctcagttcagttgtaactctatttataatatttctaaatagttgttatcaacgggtatctatgtatatagacgaatagttacccgtgattatcaataaacggatcttagctagtattccaacatatgacatatagtgatacgcaacgtagtgtatcatagcgtagtgtagtattgctgacataaaattaataatagtattttcgttgcacgttataaaaggagcagtgacaaaatgggtatgtaagaggaaatcgcattttagagatgggttttgaaagattttttttttctgatactagttgagaagctaaaagaaacagttagttcttttttagaggtctattgatcgccgctctacattgaattgttgataaaagaggttttcttaatagctcttacgtttgtcgcaatcccagcaattggtatatttttgagtatatcttacctccatttaataagatgagcaataattatacttccttaagcagctctttagatgaagaaatgggattgaaggcaggacatgaaattgacttggaaggaagcccaccttcagagcacaattcggaggagaaaagcacattgccttcaaattcaggtacgttatgttgttaatatgaaagaaaacattatagtaaaaactgtatcttgatgttatttaaaaataacatgtttgtgattatttggttacattcgacttactcaaattttcgattctaagcgcggtgagctttttttttctttcaaatataatataaattcctgttaatgtttgaagtttcagcatttactaatgcattcagatattctgacgtccgctaatcctgtgtctcaagcttcagaaactccagatcacagcatcgaaagtaatacaggatctacgcaatcgcccacaagccatagtctacttctgaagttctctttttgtattgtttattattcttattttgcaattgttgtgcttggttgcgtgcttccttttgagcacacacacactttccttatagcttttttggttatattcggtataatctctgtgatattgtttagcggctcaatttgtaagcaaattgtgaggatgttatcagttcattcactaactcttcagactactatgaaacttggaccaagactgtgaagcactttttgaaaaaagtgataagccctttcaagaaggaatacattgtgtgtgcatttttaaaaacttttgttttctatgggcttttgaaaacgattgaacattttttagttcttctttctggtgataaatggggatggaaatgctcaacattatctagcattctcactcctgtatcatgcatctctttttgcttaaatgaatcaggttcgttattgtaataatttagttatattaataatacagtacaactcagatcatgcagcactcatttgttcataaataccgtggcatggattaaatgtatgttctataaataatgagatatttcttgcaaagaattttctattaacgatattaagctcttggtggcggaaaaaatgcgtttgaaaataactacaatcaattgaatgaaacaagtcccgaagacctagtttagtttcattattgcttggtactgtcaatagtcgcgaagcgcttttctcaaaatctcttttcacgaaatattcaacgcaatggagtaactttgcaatcataatgctttaatttggaagtttaagtatggtcgatcatttgccaactttttgtactgtatatttttatctcgttcttttgttatcatttaatttgttgaccagtgtgttacttaaaagcattctacaatgctacttgacatgtttatatgggattttgcatatccattattgcaagaatgcgttgatgatggttactattcatgtcaacccacgttgataaattgcgattcttagattgactatcaaatcaactagtggaattaggaaacctactgctcagtctggttgtattcataatttcgtttatatttctttcatgattatttctcaaaatttaaactcttttttaatgaaaccaaattcgtcaatgtctacttctttgttaatttgttttagaccaatctatgttattgtttactaaatagcgagcgacaaaaaagctcctaggtaatgttatctgatgctaagatagttaagctaaaccagcataatagtaaaatactcaattgaagtatagcccactaattgaactgatgaatgtaggctcaactgtgttctactaagtttagtatatgtttatttaaatttttttctcagtttgatcatttcagttgatgaatatgaattctagttggataacctcattaatgggaattatataataatcagtgatagacaattttgcgtaatatagagatataacgatataaaagtttacaatgtttttacgcactcattacagtttttacattcgttatacaattgttaaaatataaacatagagatcacaattttaagcaccgtagtttcaagtaatttgctatcttggttaaaaaatgcgcaactgcacattagcgaattctatctgtttctacgtctgaatccgcctttaattgtggcttatgcctccacatgctaaaacgcactatttggcaatacgtgaaagacaaatacttcattcttagtcatctcataaaaactaactcctcggaaccgaggagggtaaacaagcgccgagtgtgcatttatattgattagacagggatttttagttgtacttttcaaatcactatactcttttgctttttcttgaattttgtttagtcgcagaagactgcgcttgcttattagagtatttagcattaagaggtattaacttaacttcaattccctatcaggacgtggaagaaacgtttttacgccttttgacaattgtcaaaatttgggaaaaccctactgtgttaattgtattgtaatttggtaagtgttgtgtgtgtggatggattgaacaaggaacgatgatgcgaattggcaaaatggtaacatggcaatattattattgtctcagctctaatagtctgtctttacaagttggatgagaaggagaacgattgagatgctgcttggcttttatgattataatgattattgtgatagttcatggatgggtaggaatatttttttctttgttatttttaagacacatatgcatctgcaagcattcgagtgaaataatttgttggctgattttatcctcacaaggttcaacgctaaattttgttgtactggatgctataggcgttgaaagtttcttgcttcaatgctttttttcactgaccagatttttccaattattaaataaaaattttaactggtacaataattacgacgatattcgttttatcaattccattcacgttcttctcccttttagccttttttatccataattgatgacttgttatttgaacgacttctaacccttttcttagtgttacgattttagtttccaattatttggtttaaattatttttttcatcttctacatctccgtttgtttaaacctacctatttttcttaatttccattttctactctcgatcctcaaactggttttcttaatttgttttaattttatagaatttgcataatcatgtctttgcatagtaaaaaatccacttctacggttaaggataacgaacattctttggacctttctatcaaaagcataccttcaaatgaaaaaaacttttcaacagagaaaagcgagaatgaggcttctgaaagccacgtggtagatgttgtcaaagatccttttgaacagtatactcctgaagaacaagaaatcctttacaaacaaattaatgacacacctgccaaactttctggataccctagaatcctttcatacgccgataaatgggatattatgctgcaattggcaggcaccattactggtattggtgccggcctgggtatgccattgatgtcccttgtatccggtcagctggctcaagcttttaccgaccttgcctctggcaaaggagcgtcatctttccaacacactgtagatcacttttgtctttattttatttacatcgcaattggtgtctttggctgttcatatatttacactgtaacctttattattgcaggagagcggattgcccgtcgtattcgacaagattatttgcatgccattctttcccaaaatatcggttatttcgatcgtctaggtgccggtgaaattaccactcgaattactactgatacaaactttattcaagatggtttaggtgagaaggtcggattggtgttctttgcaatagcaacctttgtatctggttttgttatcgcttttattcgtcattggaagttcacattgatattgagttcaatgtttccagccatttgtggtggtatcggcttgggtgttccctttattaccaaaaacaccaaaggtcaaatcgccgtcgttgccgaatccagtacatttgtggaagaagtgttttccaatatcagaaatgcttttgcttttggtacccaagatattcttgcaaaattgtacaataagtacttaataactgcacaacgcttcggtatcaataaggcaattgcaatgggtttaatggttggatggatgttctttgttgcgtatggtgtttacggtcttgcattttgggaaggtggacgcctcctacatgcaggtgatttagatgttagcaaattaattggctgctttttcgccgtccttattgcttcctatagtttggccaacatttctcctaagatgcagtcatttgttagttgtgcctcagccgctaaaaagattttcgacacaattgatcgtgttagtccaattaatgcttttacacctactggtgatgtagtcaaagatattaaaggggagatcgaattgaaaaatattcgatttgtttatcctactcgtcctgaagttttagtgctggataacttttctttggtatgcccttctggtaaaattactgctttagtaggtgccagtggtagcggcaaatccacgatcattggacttgttgagcgattttacgaccccattggtgggcaggttttcttagatggtaaagaccttagaacgctgaacgttgcttcgctgagaaatcaaatatctttggtacaacaagaaccggttctgtttgctacaactgtgtttgaaaatataacttatggcctgcctgatacaattaaaggtaccttgtctaaggaagaattggaaagaagagtttatgatgccgctaagcttgccaacgcttacgactttattatgacattacccgagcaattttcaactaatgttggacaacgcggtttccttatgtcaggaggacaaaaacaaagaattgcaatcgctagggccgttattagtgatcccaagatcttattgttggacgaagccacaagtgctttagactctaagagtgaagtgcttgttcagaaagctctagataatgcatcgagatctcgtaccactatcgttattgctcatcgtctttctacaattcgtaacgctgataatattgtcgtagtgaatgcaggaaaaattgttgaacagggctcccacaatgaattgttagatctgaatggtgcttatgctagactagtagaagctcaaaagctatcaggtggagaaaaagaccaggaaatggtcgaggaagaactggaggatgctccgagggaaatacccataacgtcttttggtgacgatgatgaagataatgatatggctagcctcgaggcccctatgatgtcccataatacggatactgatacgttgaataataaactcaacgagaaagataatgtcgtgtttgaagacaaaacccttcagcatgtagcttccgaaattgttccaaacctacctcctgcagatgtcggtgaacttaatgaggagcctaaaaagtccaaaaagtcaaagaaaaacaaccatgagattaattcgttaacagcgttatggttcattcattcttttgtacggacaatgatagagattatttgtctattaattggtattttggcttctatgatttgtggtgcagcttaccctgttcaggcagctgtttttgcaagatttctcaatatcttcactgatctctcatccacagactttttacacaaagtaaacgtgtttgctgtttattggcttattctagctattgttcaattcttcgcttatgcaatttccaattttgcaatgacttatgcaatggaagcagttttgcaaagaattcgttatcatctatttcgaacattgcttcgtcaagatgttgagtttttcgaccgtagtgagaacacagttggtgctattactacttctttatcaacgaaaattcagtctttggagggattgagcggcccgactttaggaacctttttccaaattttgaccaatatcatttcagttacgattttatctttggctacaggatggaagttgggtttggtgaccctttcgacctcccctgttatcattactgctggttattaccgtgtacgtgctcttgatcaagtccaagagaagttgtctgctgcctacaaagagtcagctgcgttcgcatgcgagtcaacttcagccattcgtacagtcgctagtcttaatcgcgaagaaaacgtttttgctgagtattgtgattctctcatcaaacctggccgtgagtcggcaatcgcatcattgaaatctggtttattcttttctgctgctcaaggtgttacctttttgattaacgcattgacattttggtatggttctaccttaatgcgcaagggcgaatataacatcgttcagttttatacttgttttattgcaattgtctttggtatacaacaagctggtcaattctttggttactcagcagatgtaacaaaagcaaaggctgctgccggtgaaattaagtatttgtccgaatcaaaacctaaaattgatacatggtcgacggaaggaaagaaagttgaatcccttcaaagtgcagcaattgaattcaggcaagttgaatttagttaccctaccagaaggcatattaaagttcttcgtggtttgaacctcactgtgaagcccgggcagtttgtcgcattcgtaggatcttctggctgtggtaaatctacgaccattgggcttatcgagcgtttctacgattgcgacaatggagctgtattggtggacggtgttaatgttcgtgactataacattaacgactaccgcaaacaaattgcccttgtctctcaagagccaacgttgtaccaaggtactgttcgtgagaacattgttttgggcgcatctaaagatgtctctgaagaagagatgattgaagcttgcaagaaggccaatattcatgagtttattcttggattgcccaacggttataacacactttgcggtcaaaagggctcttccttatctggtggtcaaaaacagcgtattgccattgctagagcattaattagaaatccaaagattctccttttagatgaagcaaccagtgctttagacagtcatagcgaaaaggtcgttcaagaagctttaaatgccgcctctcaaggtagaaccacggtagcaattgctcatcgtttgtcttctatccaagatgcagactgtattttcgtatttgatggtggtgttatcgctgaagctggtactcatgccgagcttgttaaacagcgcggtcgttactatgaacttgtggttgaacagggattgaacaaagcataatttatttgaaaagggtgatacccgacaagagccctttttttgtctttctgatcagtaaaagggtttccattgtttagattaactccctcatatatcgttaagttatttccgaatttcctttatttaggtcatgtatactattatgcgatgaagcatgaccaatgctattaaattacttaatatttccttattttgaaaatggatgtttgtcgtttgtcttctagatatgtcttcatccatagtcaggtttgtgttttattccaaaaacttgtcaatttcaaggattgaataacaaggttactttttaggcattatggccttactagcaatgtaaggaattttaatgtctgtgctatttaatgttgtttggtcaactgattaatttaatttgctaacgtgcaaataattgtctattttatcgtaatcggtacgatggcattttactcttaccattaactttgattcataatgaataatggattcgttttttgtttttttattgaccctcataagtacggatttcgtagtttttcaaattgtaaatagtagtaacaaaatagaagttttttgacttgggaacttctttgtacctcaatgcttaaaatatgagcttctagcccaaatgtaaaattaatagcaagtttactttgatatgattgaaccaaatattacttactaacactactttcttgaatgcgtctgcctttttctaacaacaagcttttggactaactgaaatatatttaattatttcttcagtatctcaattctagtttaaataacgctctgacggcatatttcacaaaacagttttaacggttactagcaatatgtaccatagtatgttgaaattattccttaaatcctacaaaaaccttcaaaagacagtcacagttgtgaaaaaagagcagtcacattcgctttagttgcgtggatgcaacactctgtcttccacaaaatgccttctcacaagagtttccgtaccaagcaaaagcttgccaaggctgcgcgtcaaaaccgccccattcctcaatggattcgtcttcgcaccggaaacactgttcattataacatgaagagaagacactggagacgtaccaagttgaacatctaaaatggtatgtcgacaaaatcaaccgacgcctttgcttgtggagtaactgttttctaactgagatagcgttcgtgtacatgaagttatggattgctttatgcgtatcctacgttttacgtgtgcaaaaatagaaaatggatccattctgtttgagcgaaaaatttctatataaacgcaatgtatctgttgtcttcaataactatgtaaacagttccatgcaagtcgtaaggattgtcgtgtaatatagtagagttgaatgatctgtaaataaaacgattttaagtgtactttaattttctagtagttggtggcggcgcggcctgacctggtaggaaaaacttttgacttgtaattgtcgggatagatgagtttttgtttttatttaaagagcttgaaaaatttatactcatttcaatttcgacaaagtttgtaagttattttattaaaatactttgtaacaaataaaatgactgcaggatgatttgtcctcctgcattgttttacgctacagggtttttttagtacatagggtatcaagaagctttcaacacatcttaagtctacttgtgtaaggaaaatatttacaaatttaaaacttgaccagaagtaaaaaaaataaaacaaaaatttaatggtagtcatgcagaacttcaattgagtatagattagtcaaaaacgagctagctgtgctaaagttcagtgccagtgacgttgagcttaaaaaatagaaaatagaatagaaaaagatgaaatggcaacacatttggcagaatgatgtccaaggaaatcgatgggaacatcaaagggtcagaaacaagagaataaagcgtgaaggtgttcaaagcccacctacccacttgcaatgaaggttgagcgagacgcaataagttttaaatgataattggagggtctttcttttttttttcttcgctcaatgaaaaaggagataaacaaaattgcaataattcatgtcttttaataacgatattaattagacaactcgaaaaggtatgtgggtcgaaaggcgtgtggggaactcaagagggcaatcagaaagtaaagccaacgtgttttataatacgatggggaaagcgagggatggatcaatccaaccaacagcgaccagtacaagggaatttctctacgtaaaaaaatgctaaaggccgctaaagggctgatccatccaacggaaaacaaacacttaaagtaatccagtcattcgtccaaaaacttttctgagaattcgcagttttaacagcgttcttacgcatctatccaaacgaaccttatttttttttcttcttcatcgaacgaatcatacaaaaaacatcaaaaaaagcgattaatcaattcaatggtgcatcaacaactctttctgtacaagtgttgcttcataaagagggttaaacgactttacttcttgggaacagtctgacgattctgaaaggccatcatgctgccgatgtattggcacagatactcgctttctcgactaatgttttcagattcctgtttgttttgatcgatctcatccaacaaagctatcaattgttagtcttttctttctccaaaacgcaccgccatcgtaccttgcaattgctgttgcaattccatcgctttcctatcaatttagcaaagaactagcaaaaccacttactgctccatcaaacttcttggcaaggaatctgtactcattgagtaatgcgctttttttgtttttttgcggaaaatgggaggttgggaagtgtcttaccagcgtagcgtcaatacatgtcatttcccattgctgtgacttaggggtgtcactcaatttaaagaggccactgcaagagacattatccttaattgagttgagtattgctatacgcaatatttaaatagcgttttatgtcataatacgttttattagcgaacggattacattggagtacgcaactgatgggtcttgcaataaacaaatatacatagggcgaaaactagaatgagtgctgctgtcttttggatgaataagttaaatatggaacatactaataatggatccacacattaataaactggaaaaagatcccgtcccgtaaggataaatcgaggagagaaagcttgcgtctgtgccctaattatgttttgaaaaacatgaaatgcacacttcatacaccaggatgcgaaagtctttcaacaatttacatgggaaaaaaagaaaataataatctaatagaactccgttccaaaatatggaacgttggtacaaatgatgcgtttagggcgattggaagaggcatacaatagatgcttcttccctccattatgcaacggaaaggtcgacggttcaaaaatgaatttaaataaaagatgtgttatgaaaaatgctttatggtaacaggaaaaaaaatgctattcctcttttcccattccatagtttttattctcacactatcaccagtcatgaatattttacatcgaaaaaataacgggtagagcgatatatatgcgcaaactaaaagagagtatacaaaaaagtaatcatgttctttatcggattagttcttgtcaatattagtattagcattcaaaaaatagtccgattatcattttactgagacgtctctggtttctcctcaggtttctcttccgcagctgaagcatttgcaagagccgactcttcttcttcttcctctatatcaatttcttcttcttcttcttcttccgatcctttcccatcattttctccttctccatcaccatcaccttctccatcaccgtctccatcgtcttcctcctcctcctcctcatcgccttctccctcttcatcgaattcttcctccatttcatcagcttcctcctcttcttcctcttcgtccgcgtcaggctgaactggtggagcatcgtcaaagtcgggattatcccactgaatgttgaatcgagtcacccttggcttttctgctaaaatactgcgccagactttagaaatgtcaaccttgacctttttaatttctgcatcgtccatttcctgaaggttcaggccctccatctcattgttgacataataacctactcgaacaaactcattatcctcatatgcacaagagagtaaaataactgtgacacccaaaacatcgctgagttgaggtaaaagatcgatattaggaggatcagcttcaaaaacgaatttattaatcccgattggtataggtcccactagtagcgtgtccaaaatttggtcgtaactttgagacgtcgcactacctacatatgtcaacttccattccaggtcgctttttaacggctccagacattcaaaggtaatttcgaatttatatggatcagagaactttgccggattatttagcacattaacactaaggatattcacgattgacatttcgaagtgaaacgcgtctaagcgattgccaagaacagcgtaggtgaagaaaggtttcgtagagttcggataattaaggatacgcttgactattttatatcgcttttcgtgctctaaggtaataacacctatttgattcaaacatataaggattaaaatgcagtaaatataaatactgaaggcacatctaaacaatgcctcactattcggtaaacaatagaaaacataaccattgttaagtattttatgcgaaagtacgaagaacttacagagcagtttagttaaacataaccgttgtttaataaaaatttctatttcattaataatgcatgcaatgtacaattaatatgatcatcaaatttcattgtgcaaaaacaactcgtatgtgaaacataaaaaatagacataacctccttcatctctaattattaaaaaagatatacaagcggattaaaacatatatttagggttattgtaagttccttcgatcattcggttatataatattgatgcagcttaacagcaaatccgaatgacttgttaatgatgtgaatttccatcagtatggaattgtagtaccatcatagttgaaaaaaaatccattattttcgggcttcaaattgtctacaactttcaacatatctgaagcgctttggtctggtgccaaggcctgtttcgcaaagatatctaaaatttccggtttcgcttcagcatgctgatttacagcttcctgagctgaatcggttcgaaccattccgggatgaattgaaatcactatgaatccttcatcttgtagctcaaaactaatttccttcattgtaaaatttaaagcagccttggattggccataaccagattggttaaatgggaagaaagcacccatggatccaactaatgatgaagtaaaaacaatgattttagattctcctttcttcacaagaggataaaaggcttggtagacatgaattggtcctaaaacattggttttatagtgagagttccagacatcatcaggagtattcagaacagtgttgaaagaatgaaaaatgcccgaatttacccaaagaacatctactttacctacagcttttgcaacttcttgagcggcttcattagcactctctagagaggagatatctaacttaataatatgcacattggaatgagacttgctccattcttgtaattcagtagcagcttcaggcttgcgggcacttgcaaatacaactgttccttctctgttgctcaattccttaacaagagagagtccaatgcctcgatttcctcctgcaataaagtaaattttgttggtagtagacatattctaacacaatatttgaatgatccttgaatccgtttgaaaagtgtaatttggtgtcggcaatttatcattaacttcgtgcttatataccaattcttcaaatcattatgcttacgtgatttgaaccgtgaattttgatgcttacataattgaatatacttccaaaatcagcaggttcatagtagttcacgtagagcgttaggtgatattttgccatataatatggatattgcaactaatctttataacccgttccattggtttgtcagctgcttccttgatactgcttgcatactgaatagtattcctttaaatgcacctttcttttaatttccttgataaagtatcataaagggagaatttatttgaaaattgtttaattgataatgctgagacattggccataggagaaaagcgttgaatcaggatacaaaaaaacaactcttttaaaccttgaagtcctttcacaataaaaattattaaacaaaaaaaacatagaaatagaataattttaagataaaatataagtttgcaaccgatttaagcattgctgtatgaacacttgaattttttatatgcgacgcccttctttatatatccaaaggttgaataaaacgtatcaagatctaaaactgctgaacaatccaagtggcaccttggactcgctcaaactttttatgctcgtaaacatttgtaagaacatatgaaattaacaaaaaacaattgtttgaacaaatcatacactggaatctagagagcaaagtacctttaaaaggggatatcaaaaccgtcatgagtacgaaaagatccactgttttcgggtttcaagtcgtctacaacctttaacatttgtgcagcactttgatcgggaggaatggaatttttttgaaagtattctaacatgacaggatgttgtttggaaaaatgctcactggactcttttgacatcttggtttgtacaagtcctgggtgaattgaaattacaataaagccttcatcagctagttcaaaactaatttccttcatcgagctgctttagactgaccataagctgaaacagttattggaaaaaaagctcccatggatgctactgatgatgaagtaaagacaatggttttagacgctccttttttcattaaaggataaaaggcttggtagacatgaattggtcccaaaacattcgtctggtagtgagagttccaaacctcatcaggagtttctaatacagaggaataagagtgatagattgctgaatttagccagagaacgtcgactttacccacgattttttcaacctgcttggcggcatccttttcactctctagagaagtgacatccaacttaataatatgcacattggaatgagacttgctcaactcttgtaattcagtagcagcttcgggtttgcgagcactcgcaaacacagtcgttccttctctattgcttaactctttaacaagagagagtccaataccacgattcccgcctgcgataaagaaaatcttgtcagccgaagacatattctattttttgaagtactcagaaaattccaaaattcacgaaaagactgaacccttaaaggctgttcagctattaacacatttgatgttgttacgtcacttcagtcgcatatttattgccttaaaaggtcgtcaaaaagtagtgaatgtatggaaacattgtcgttaaccgtaagctacattaaagcattgcagttcatgccttcatagctattcaattatttaccagacgtcgctgtaattttggctgataacattgccactgtggttaaaaaatggaagaattcgttttccagctttggtggtggtaggagtaattatctacgatttataaaaggtagcttcgagtttgaggttgaacaaagtttttctttatatattattaaaatgcaggctactcgtaaacaactagtctcaaaagacaaaacgagtggttttactagctttccaaaactgtaatagtacatgactgattgaagggtacaacaattttttcttttgatctatggtcatttgttcgtgtatatagaattgtagaagttgatcatttttttccaaatcctttattctggcatcgttgcataagtacaaaaaagaatatgtctaaaaaggaatgatggtaccatcatagttgtaaaaaagtccattattttcgggcttcaaattgtctacaactttcaacatatctgaagcgcttttctcgggtgttaaggcctgctttgcaaagagatccaaaatttccggtttcttttcagcatgctgatttacaatttcttgagctgaatcggttcggacagctccggggtgaattgaaatcactatgaatccttcatcttgtagctcaaaactaatttccttcatcgtataatttaaggcagccttagattggccataagcagattgacttgaagggaagaaagctcccatggatccagctaatgatgaagtaaaaacaatgattttagatcttcctttttttataagaggataaaaggcttggtagacatgaattggtcctaaaacattggttttatagtgagagttccagacatcatcaggagtatttacgacaggaccaaaagaatggaaaacggctgaatttacccagagaacatccactgcatcaactacttttgtaacttcttgagcggcttcattggcactctctagagaggagacatctaacttaataatgtgcacattggaatgagacttgctccattcttgtaatttagtagcagctccaggcttgcgggcacttgcaaatacaactgttccttttctgttgctcaattccttaacaagagagagtccaatgcctcgatttcctcctgcaataaagtaaattttgttggtagtagacatattctaacacaatgtttgaatgatccttgaatccgtttgaaaagtggataatttggtgtcggcaatttatcatcaacttcatgcttatataccaattcttcaaatcattatgcttacgtgatttgaaccgtgaattttgatgcttacataattgaatatactcagcgacaagttcataaaaattcatcgtatagaacttattgtactttgtattagaagacaatataaatacatttacaacctatttagacggttttttaaacatattcccttaattccgctttaataaattaatcaatttcagttaaattattcttctgtttctggtttctttgacaaagcatcatatagatgatatgtatttgaagttactcacatgagaatgctgagttgccagtcgtatagaaaagctttaaattgggtacaaacaaacgactctttaaattgctccaccaaaaaataaatttataaaaaaacaagatagccgtaagatgatcgatcactcgggagtcattttttggacgataagccttatacgaatgaatactcaaatttgttacatgaaacacatcttttagatgtccatgctcactaaatagttatgttaagcttttttaaagttctgaaggcttgtaaatatttgtaagggcatgtaaattcaacaaaaaagaacgattgtttgaacacaacatcgtgctgtaatctagactgcaaaaacatctttaaaaaggggcatcaaaaccatcatgactaacaaaagatatgtctaaaagggaataatggtcccgtcatatctataaaaagacccgttgttttcgggtttcaaattgtcaaccaccttaagcatggatgaaacgctttcttcgggtatgatagtaaccttttttaagtaagtcagcatctcgggagatgtttcagtaaattttttgatagcatcagcattcatatcagtctttactactccaggatgaatggaaatgaatgtgaagtgttcatcagctagttcgacactaagttccttcatagtgaaattgattgctgccttggactgaccgtaggcagagaatccagtagcacgaaagtcgcccattgagccgcattcactggaagtaaagataacctgtctggtttttttctttgtcaacaacggataaaaagctttgaacacatggataggtcctaaaacattggtttgataatgagcattccaaacttcttcaggtgcttccataactgtatagtaagattgacaaataccagagttcaaccaaagaacatcaattccatcgaccgccttcgcaacgctttgagcagcttcattggcactctgctgagatgtgacatctaattcaacagttttaacattaggatgagatttgctccattcttgtaattcagtagcagcttcgggtttgcgagcactcgcaaacacagtcgttccttctctactgcttaactctttgacaagagagagtccaataccacgatttcctcctgcaataaagtaaactttgttggtagtagccatctttatagtacaatctcaaagtcgtttctcaattagtttttggttaatagtaactgacacttccttggtgttttgctgtacttttattgataaggagtgtttgttcgctatttcgtttacgtgtgaagagctgtgacattttgcacacgtttgattttctcaaccaaaagcgtcaaatttcattctacaaaattctatcggtatttgctgcttgatattaacagtctttttatatgggacttgcataaaataaaaaaagtagaagccgtgttaattaatgaaatcgaaaattttgattgtagagcgtagtaaaggatgaaaaaattttaagaactacttttcctcgtttttgaaatcttccggtagaaagaacttgtcagattataataaaacaactacagaatctatctcatacatacatcgaagctgcaattttttctcaggttactggttcacctcttaggtcaatttgctctaccaatttaaaccctctgtaagataatatttttgttgaggagaaagagagaatcgtatatagagtgtcttagtaagattatatgacatgaagttttacagcatctcaagattaggcttctttacgactatatgaccaatacaaaatggatggaaatttgcgaataaaaaaattcgcaaagtttaccttatggaattaatatttacctgtttactcatttgaaaggagcttagacccttaagttcccctttagcaattcctgaactcatggaaatgctagttaaactttgagcaaaccatttattcaatcctttctccctttttactacaggaaaagacacagattcaaatgtttttgaaatctccaacgcatccgtattttatttaacgtatattaagcgttccttaaacatgcttaaaattaagcgctagagtttccgacatttttttttctgctaacagtactttcgtacttgttcaattgaaaggtttttgcgcattgcatttatgaaggttcctgcgtattggaagccgcgagaaccaaaaaatgctttgacatgtgatccacctgttccttatgacttgcagtcatcttaccaatggcaatccattttggagcacgatacctgctatgcagctgaggtatttgacaaaatgatgatagaattagtctatcatccagagcggacaagcagtgttatcatgcgaacagacataattcttgattctcaagaggatgattcaattctaaacaagcagaaatcagttttcgaaaatcttgacgaaaggtaccaaatttcaaggtggatcgatcgtcgaattattcctcgtaatactaatttggatgcgacaatggaccaaacggttgttgtgctacatgagaagcttgaaaatgatcgtatattaatgtacttacctcacctggacaaaagtttggaacagccctataatcatcttccatactatcatcccgcagtagctggaattgcttttcattacaaaggatcaagtgttgaggttttatatttagtagaaaaggattttcaaagggaattgtcttcccgtttattgcgaacagctcatatgcttttacttgttttacacaagcattgcaagggggcagtggaagggtaccaaaaacgcatgcttcacgacactgttgtggaaagaaacaagtttcaagatacctatgttattctgaaagataaatacgccaagcaacttgttgacaattgggtagaaaaaacggatcctggtaaacacgttttcgaagatttggctattgcagcatttcttatagaattgtggaaacaaacttattcatcaaacaaagaatttagttttgttgatgttggttgcggaaatggtttacttgtttatctgttgttaatggagggctataatggatatggcttcgacgctagaaaaagaaaatcatgggagacatatcccctttgggttcaagtaaagttatacgaaaaagttcttgtaccctattttctgcatgattttgaaacaaagattccatttcctcagctgcctgccggtttcactatgtccgctgcaaacattcatgacggtcgattttctgaaaactcattccttatcggaaaccatgcggatgaattgactccttatcttcccattttagcaagattaaatcagaaatgctatttcatgtcgattccttgttgcgttcatgatctgacaggtgctaaaatttcctgggcattaccgaaacctcgaaatcccaaacatggaggaagatacgccatgtacattgaatggctcatgcagctgtcagaggaggtaggttggaatatcgaggttgaaccactacgcattcctagcaccagaaattacgctcttataggtagaaaattactatcgaatgatctgctgcactccagtttaagcaccgatgctttgtacgacatcgtagaaaaaaatcatggctcacaagggttttttgtccatgctatgcaagttgcagcggctaattctcggtctcattagttcaaaaaatttccatttttttaatatatagaattctgccatacggacaaagttcgatagttgcccttgattcgcttactcaactttaaatgctttaaagttcgttagttgagtgactgctttttagatgtttatagtcccaaatgatggcttgtttttcttactactaacaccatcctctgaaattgatatagttcgtgtgctggtaatctcttactggccgttcgatgactatcggttattggattcggtgaagatggaacagccattgtatctgccaagcttacggatttccggatgaggaacttggttcgtaaaaatggcaaaattgtttgttctcttatcgatcaagatttaatggttaataaaatgctttcatgtttacaagaaaataaaactatatgtgattggttcataaacgcgtttgtaatgtagatggttgtcaatatgtttttgattagcgtaaaacctatcaattgttgtaacgtaaactgttgattttgggtctactaataagtgacatagaagaatttaattattttcaacgaactttgctactgtttgttgaatccacgactataaatcaccttccatcataaatgttccctctactaagcagtaattcattttttaaacgggaagtcaagctgaaaaatatcactaaaataaggagtatgcatatttcaaatatttgacaattgccaagttcaatgagtaagtactttttcttaaatagccaactcttacatgtcaaaaatggaagccttgaaatgcaaggccagaaaaataattacgttttaaagcccaattctactaaatgattgctaatacagtagaatatacttaaacgaaaagattctgaaattccatcattgactcatactctatatacacaattaattaccagcctattaactttagtttttagctcatcaacttcaacattactaattattctttatttaaatttaatgtaaacggtcgattactcaaaccaatttaatactattctttgtctatttgcctaaatattttatacatgtcacgtttttgatcaccaccattctaaacccatactatacttgactctacagaatgctgtcaaaacggggattaaatcccgttcaagcggagagcagaaagaagaaaaaaagagaacaaattaaagtgcgagaagaaagagcaaaacgccatgaagaacgactgtcgcataggaatatgagccaaatggaacgccaattatcagagctgacacaattagaatcttcgcaagctttaaatgcacatgacaagcaattattacaaaatttgcaaagagatatggcaattatgaagaagaaaaacattcatggacatagagttgggcgtgttgagtcagacaagactaaggaggcagaacgtcaacataaacctagaaagccttttatccctaaaaacccaaaacgaagtatatattatgatccaatatttaatccttacggagttccgccgccaggaatgccttatcgtgagaaggaagaactaagttcagaaacagatgaatccgttattgatatacctttaccttctgaagaatatccttttgaggatccaaagccaagggaaaagaaaaataagagctttaagccaaagcaccacaaaaagcaagacataaatgcaagttcagcacaaccaaaatccactactacgacagaagctgctgcaaatacgaaggacattgaagaggaaactatgattgagtactcagctcagccggtagtcagagatttacgacaagaagctgctcaatttttacctgctgcgtttcaacgacaaaaactagccaaggggcagaaaattggacagccagacagggatgtatcgagccaagttcaggaagacaaggatgaagaaatagataatttctacaaagaaattggcggatatctataaaaaagtcgttaaaattatggagattggaagtaaggattaccaaatgggtgtagacggaatttttagttaataaacatgcatattaatttatatataatatctgtttactaggttcaattttaaaggagcttgattgcatctctgtacttgtttttttgttttattcaattatgagtgagctttcataagttaattcaaaggcttattattatgatgcggtcaataatttcaaatttttgatgtccaaaaaaaacaaaggagattttgtttctgtgttattgcatgatatttattaatgttttcttggttcaataattccttattatagtcacttttacactgcttgagcgaaaggggatttcaaaaaaacaccttatattcatctttccgtgattatttcaagttgactgttttttgtgaatttgtcttttgctaaattatgattgttacacttagtcctacactgttcattacgaatcagattaccaaaaagaaagaagtacatgactaattacttggattaattttattttattttcatatgtatttagacgccatgacagtatttacatgcgtaaaccaacgaattcgtttatcaaataaaaatatcataaaggaaacctttaaaaatcgaaatacacatgcttaagttaaaatttgcacaatgagagatgagggagtacttatctatcttttgcttgcttttcttgggttcataatctttggttttcgctataaatgctgtatgagactaggaagcttttgcagtcaatcattctattatttataaaaacaaataagttatttattgattaaaaactcgtgatacttttttttgctataaaatgatttatttacatataattacaaggcactcgcacgacctcgttatgtgcgaggagccatgaaattgaatccattgatattaaaattagccaaaatgccatttcttaagaatgggtaaagtcctgttagagctgcattcagtaccatggaatgaagaaggtttgagtgataatgctcgactttattcatttttggagttcgtaagcccgaaaatcgaggaattgaagtacagaaagcttttgttagagaaactacagactcacattagggaggtcgttttggatgctgaacttcaagtatacggtagcatgtatattggaacaacattatctataagtgatgtagacgtatctttgaagtcacctcgagttggagaattggagaaacgacgcgtcaccatggttttaagaaagtacttggatgctgatgctgatttccattctagtgccagagtccctcgcatcaatttagtagatgttagtggaattggggtggatttgacgtttggaaatgacaaagcttgcagaactgctgaattgcaaaaagcttataacgaagaacacccaatttttggtagattgctgatgctattgaagcactggttgtttgaaagagatttggaaaacgttcatcatggcgggattgcaagttgcgcgctctcttatatgctaattggttggcttgaaatgcgatttcacaaaaagggaattgattcggaagtgcaaccaattcgagctttactacagaaattcttctatttttggggagtcgaatggacatacgaactttttgtattgagacctttaaccggtcaaatagttcctaagctacaaaagggctggttaaacgaagtgcaaccaaatttgctatctattgaagatccaattgacagaaataacgacattggaaagcaatcatttcaaattagtatgattaaagctgcatttgttgcttcagctaatgaattattatccgataagacatggtttagcacctttgcaattacggaagatgaaatgtttttgtgtaaacagtttgaaaatgttataaatactaaacgaagtttggtggagggatatgatagtgatacggaatcagatgaattacaagctggcggataactgcgggttaatgcatttaaaaaataatgctcgctgtttaaataaacatttgtttttcaattcctaagttgtcttgccgcatgtggtaatgtttcactacagttcgtatgtactttactcttgtttaattgaatggattcatattcttattattgataggatataagaatcctacaattatcttagtcattttcaagtcttttaattttacttaggcaaggttcggctgtttcaaatgatatcacattttgtacctattgaaggtgctaacaaaatctgttctttaaaaatttcaaaattaaatctattttattcttttaaaatctatccaaggatccatgttagattttcaagtcaatttaataattgcatttcacttagattaataaatgtgtgtgcaatctatagctttttcgaaagaaggacgctatcttctgttttggagctctcatcaataatgaatccccgatgaataaaccattcggatacatcgagtttagggcttaatttaatgtaaatttctttggcttttccctcagctgcagtctcgcaagcatattccaacagcttggtaccaatagaacggtttcgataggctggcaaaactgccaaagataaaatttggattttgtgcgatttattatgtgtttcttttttgcatctaacagctcctacgcagacctggttaaagtacgcatattgtgctaaaggcccgactgagattgtgtctttgtaaaaggaggttggaaatataatgatttcaggatcaaaacacttttcgttaataacttcaaggattttcagattattagggttaatcgcatcaagttcaatcatcttttttatgcaaatgcaaatatctttttctatatgtacttggtgttgtcaactttcagtctttaaggcattctaatgcaatagtttgagttggaaacatccacgataaaatctttaaacagtacgctgcatttcattaatcccgttgtcacatgaatgtgaaggtattgtagatgctggtcgcataggagaagcgttaacaaggctgaagacatcgtcatttccatcttcctttgtgtctacgtttccttctttctttgtggtagagggctcttcaaaatttgattcttgtgggataatctcttcggtggatagcttttcacttgcagaaaccgcaggattctcaaagtcaatatgaagttgtctttgatattcatctattaatcttctaagccaagggactgtgtagctaatggctggccatgctgtacctagcatagtaatgaagttccaaaggctccacagggccataaatgaaaataccagcccttgtataatgataagaatgattgcaatgatcactttcggaatgattgctaaatcaaatgctatcggtatgagaagagcaaaggaaaccactcgggtgagagcaaccaaaaagacgcaaaaggaatttttgaaaccaacaaaaggccgaaacactgctagcaatataaaagagatgatttcaataacaaatagaagtatagtttgaatcttcgcaaactgttgtactaacgctaaaaccaatgcaaaactaaaataatgtgcaaagcaggcgtaaacatagagccatcgccgttcttttaaatccaaatataaccatccccaccatgtgtatatttttggatcgcttatcaatgtttctggattgtcctcgttactcaagcctgacgttgttatcactcttatgactttgatagttaaccaaaggaaaagcccaaaaagcagtgccagaagcaaagccgccaatattacagggccatatgcttccctaagtgtaaactggtaaattatcatagttaccaatacaggccaacaaaccaacacctatatcaaccagattagtataagtataaagcaaaaaagtcgttaagagctatgtatgaacaactcattcctttgttcaattaacttacccatctcatacaagcattaaaaagtactctaaaccaataccttgtgatataatcgcatgaagattttgcgattatacgtgtctgacgaagaaacttaataataagtacgaatattataacgattcctcctgctatggccaaagaaatcaaaaaccatattaaagtgagtgtaaataaattcgttgttagcgttccaacttcggtggctaggccttgaaacccatggtaaaatccaggaatcgggctttgagggtttgttgcaacagcatctcttcgatggactccacctatctttggagaacttaggtttccattggaatgctttctaaaagactcaaggctgttttctatctctttattggtaataaatcctagaatccatgcaaaattactagcccatgcgactagcacttttggctgtgtaattccaattgctcccgtgaaagctatacattgaagtagctctcccatgtgctgcaaagaaggaacggaattgatgaaaacctgacgtgtcagataggtgctatgctccattccaattacataaaagcctaagacgcctgctatactcaatgccaaagcagttccacttagagcttttacgactttatttttaaacgtatgaccattattaagtgtcgcgatcatgcacgcaagtggtgtagaattatcgatggatgacgctgcgatgtcttctgagcgatacatgcgaaaacgcactaagccttcaaaatcaggaattccccaggcaatttttgggatcatctgaacatcttgagggctcactggaagtattccctgtgtggttatagctgtatctcttgcaactgggcacacagtattaagatttatttcacaagggtcgaaagtaaatcttgccctctgctctccataagcttcaactataatatcaaacgtaacatttgcgtccacagatgaatatccaagaatattaaagactactgacaagtttcgtgtataataacttgcatcaaaccgattaaacactatcggggcatttgacatgcattctgcgtactcggctgttccaagtttgtgatttggtctcttactatatcttactcgaccttccactgacgataagatattacttaaaactgcaaagtaagctaagagtattagcttcattttcattttccattaacatcccccttccagttatgtagagggtttaactttggaacgaatgcaaaaaaaattaaaatgaactttcctcagaattaccaaactatcacgaataacaaaaacatgctactgaactcaaatgccgtaatttgactgtaatgtttacgaaatagcagtcgtattttttaacaaccatagcattgagttaaatacaaggattaaataaatagtaatgaaacgattgaagctttaagatttttacgaaaaagaatacagaacgtggcttcgtttatttagttaccaccatcttagcattgttcttacgctcacaattttacactatgaaaaaagcaatataatggtaaagaatgtatcattagtaaagaataaaaaaaagaaatgcattttcatttcatttgtagttgtgagaagaaatgatggaatgtgcgagcctcacttgattttatgtcattatgttttggacctcaattagtaataaaattattctgttgaagtcatttctgaaggcgtttcttgatttttcgcttgtaattcgttgagttgctccattaaaagatttcgaaaaggagtcagcagcttctctttagttctatttaatttcattccacaatttggaagttgtggctgcggtactccatgagctgtagtgggtgtaataattgcggacccaaagaagttataaagatgtaaaagccattcactagtactatctttattctcaatagccttcttgctttcttcatcaagttccttcacataatcaccaatttcttccaaaacttgatgttttgtctcttcatccaaggtatttaaagctttatgggcaacatctaccgcatcaggagtcttcacctcaacactaaattgttttaaacaatggcgataccagtcgcaccactctccacaaagatcgggcgcattcacaacaagtcggtgaatgaaacggacaaagcagctttgataacgttcaacaagattgatgaactttactaagggagcaccggcctttgaaagctgaataacatcccataagaaatactgaaagtcataaatagcttgtgaaaaatcggcagcttgatgtgcttcgtaaatgatattataaaacgcattcataaattctcttacaacatcattcagttgatcgttgtcacatagatcgtggattaaacattcgcgatcacgatgtgttaaagcggcatcaaaatatctcatggcaatatggacacctttctcggaataaggatcgaaatgaaagtcttcaatctcggaatgctcggtttcagatgcagtgtcgggtacttcatcttcattgccttggacagacgaggccttatcggagtcttccttatcaactccttcagtctcggtagtttcagtttgctgtgcttcgtacgcctctaaaattgcgatagtaatgttcagttccttattgatgctttgagaacgaacatcatcttgttcagtacgcgaaagttgagtgaaccattgcaaggctttacgcatcgtctcccattttgcatcgtcttcaaattctgcatctgtctcaaccatagtgctctcactgtgctcgagatcggcattaaaaataccggccaacattgtttgtagcagattgcgactttcgccaaaccaggaaagcggtttcatcaaaaaaagtcgagtaagaccagacatcaagagaccagcatttccaacccgaagtacttggcgcgttaaaaaccaagggatacgattgtaaagacgctcaactacaccttcagggccctttctattactaacaaggtgaggagactcaggaatagcatcgacggtaacaaaggaaaaatgcaaaataacagcaatcgtatagcgaatgttttctatcacagacctcaaaggttcatcccagctgtcgacatcctctgatactgaaatcctatcgagagcttgttgaagaccatcaccgtacactaaaagtgaatatgcctcacgaagacgcttaaccgaaggataatgcagcctttcggggccatttgcatcatccatattcacattagcaagcgacttctgaactgaatcagttgaagagtctgcattggagctttttgcttcatcggcatcatcctcttcttcattgttgcttgtaggctttctgtcttctgacagaggagttgcttttcccaataaacccttcgacaaaacatgtaaaacaacaaccaccgcgaatccaaccattttacgcttgcttacacgtccatggtcgtatgaatcggataaattgtgttttccaattgtttccaacaagggttgcaatttatcgctccaaaactcagggggtgccttattcacaccaggcaatgtaggtgtaaaaatatagctctgcgcaatcatcttcatcaccggtgaatcctcagcatctgcgaactcttcacttggtctaaaagggggtccaaatttggctaaacgacctgtcatttacagttagcaagctagacaaagcaatcaactacttcatcaacgtaggaacgacaaattacaccaaactaattactggtacaacagcttgaccttgctctgatgcttatgaccaacattgaagcccaaagcggatgaaaccaaccaagcattttaagcaaagacatgccattttcggctcagcttgcttcgttttgataagaccgttttactgaatgacgtcgctaaaaaacatacctggaactttaaggccgctaaactcatgctgaagttcaagcaatagtagtattgaggttaaagaatccatgtttacaactgaattggtaaacgacggagacaagtgaagggagcaattacaaattccgttgcgttgatatcttgaaacgccatgacggtttgcgtatcgttaacaaaacttagcatatttgcagtggaatgtacaataaggagttttcgcaatcgaagacgggtaacacaggtcacggaatccggtcctaggaaggaggtgtaaataaagataaatgagttgaagacaatcggaagtagaagattataccgaatattcaaacattggagaggaacaataaattaaaaaaggaatttaattagtttacacgaaagaaagacaacctcaaagatctagtccatcctacgatgcaccgtagaggcaatcgaaggaggccgagaagcctttggagtcgccggtttggaattcctagtagggtaacgactagtatcgtaaagagttgacattggatcctctaaaatagggatcactgaatcggtcattcctcttgtttgaactggacgcctagcacccatagtatagcgtcgatcggacggcgcaggaggactggaagattgattatttcgacgatttcgcctttgagttaatgtcagcatatcaaacgaatttggaggcatggctgaaggcacacctatcatggacgcagtttccaaggcatccgagctagccatgttagtagaagtacttaaaagatcagaaacagagccagccttgttcatcgttaaaggattgccgcgaacgcgacctccaaaacgtgaaggcctgcccgtgggattcaagcctgaaggagaggtaacgagaggcgaagacaagtttaccatagaagcactaggaattttgtatatggagttgggacctttgggcatagagcctccgataggagaagaagtaaactgtctagtgttcaacaagtcatcgacacttccaatacggttagatatgccaatggtggagcgagatggtgagcgtgaggcagcacccactggagagcgacgcattgcaggattgaaattgggggaagattgaggcgttccagctctcacagttaaatttcttttatttttagcatcaaacagagctagtaaagtttccatacgaggaacggatacgccaagctccttggcgatttcgactgggtaacccaataaaactgcaacctccaaaggtcgatgtgcaatataatcctgataaggataagaaggtcgaggagttgcaagcatacggttgacaatatgacgtttcaaaacatccaacttttcaggttcaaattcgcagccttgggcttgtgcaatggaaaatgcttcatccatcagaccatcaattacttttgcaaaagacttaaggcggtacattaacgctaaatttggttcgtcatttataatagacaatgggtagaaacacatatgaccaacccctgtttcccattgctttttctgaattttggaaagaaagtcacaagagacaccacctgcttccaaagttaatgtaagagtttcgatcattgcatcttgaactgaatcggggacatcgtcctcctcttcagtgagtccaacataaatgacacttttagcagaatccgcagcaaatgtggtatgctcaaattggagaggccccctttgagcaaattgatcaggcaaaacaaaagagagaaccggattattagggaatgcgtgctgtaattctttttcggctcctactataccagtggtatttaagacgatgcacgtgtggccaggggtaactacctctttaattgctgtatctaaattatatactgatggaagaatttttaaacatacaaaaatatagtcgaacggttcagaattcatagcaagctgctcaactgtcggggcaactaaaatgactcgattagcaacttgatacggagaaaaaataataagttaaattcaaccaacataccaacatccggtttccatttagttgaaccaaaaacacttgaacgaatacggataccttcagaaagaacactctcgcaacgatttctccaaattaaagtagtatgacaagccttactctcggagagacgccagctgataaatgcagaaatcgcattgcttccgactaaagcacgttagcaaaaaaattataaattttttaaaagcgatcaaattaatgcacgcgatattcaatacaaaaaataaaataacacgcagtttaaacaaaaaaaaaccataccacttaatatgcgaagcttagatgtatcttcttccgacatcgttttttaacagcaaccttaagggatataaaaaatcctggaacacaataaaagatactattaaatatctatttatataaaaaagatattttttcaaaacgtccaatattaaaacaaaagaaggatcaaccttctctattctatagtttcgcttttaccgtatatacacacttccaagcaacaacatccacaaacaaactaaattctgcgcttgtatttttctgaaaaggaaagtttgtgttctacaaacttttctttatgaattaagtcgtttttcttagcgagaaattgctccaaactggaatttattgattctagcaaggagctagtgtttggtagacggtaagtgaacagctgtgtgtatgtttatgttggaagatattagcattctggagtgatgctttgctataattcattttaataaactaattaattatattcaaatatttttctttcttttcaaaacgtaatcatgcttgagtatatagcgccaagaagttttgaaaggctggcacagccgacatacacatatacacctcaaccaaaagcactttagcttagctgaatggttgggatttagaaaccccaaacttcaaaatctttaagtaactccaaattccagatattccaatttttttttattttaattgattagaaaatttttttttataaattgttctagctactgactttaagagtatgaattcaagattatactatgactacggtataaacatggtcacttaataacttatattcaaaagatgaatagcaaactaaactaacaacaatcacatgtgtaaacaggattccagaacgaacgccaaggattgagacaaacaaagatagttacaaaccaagatttttatacaaatataaatatgtaggttccgacctccatttaacgagcatacaaaagctacaaagaaacccataattatcggacgaagagtcaaagaaaaaagtttgacataaacagattataaaaaaacaaatatatgcctaatcggacgaattgaaacaaattaactctataattaaagacataaataacctcaagtagtagaattctgtttttttttataaaaacacagtgcagacatttcagtaatgagtttgaagcgaataaagagaattaaaagaagtaaataaacaatatttgtcaaaacatcacaaaattaggaaaagctcaacttgtatcaccaatcggtttctaagaaccgaactaaccaaacacaccaaagaggcagtaaggataatgccatctgccagcagaaaaactcccatcaaatttaaattactttgtgggaacaaggagccaaatagtgatgaagccatacttcgtccatcatgcacacgtaagcctcttgctcatacaattaatcgacttttccgacaagaaaaaaattcaagtcgaaaatatactatctaccgaaaatgatgatcaacgcattgtgttttatataaaaaacaatcgaaaatcagcgaaactgccatagtttcgatataatttacataacgctataccaatcccaggatttggaaactcgtgacaaatccgatggatccatattcatagtgtgcgattcagcaacagaagacatgcccaagtctgtgtcaaaagcatcaaataaaggcgaatcaacaacaggcgcaaagtcgttcttaccttgcaccatagacgagtcattagaatcaaggtgggcactacccaatccttcagaaaaacctaacccaaagtcatttacaccagcgtttaagttgttggctgatagcatggactgggatttggattcattttcagaggactgttgctgcaaaggactccgcatgctaggatctaaaggtatcctttctgaggataaggattgatttccaccaacgaatccaggagaaatagatttgctatcagctttcggcttcatatcagcagcagtcgatttggcactcgacgatttagagctgctcttcctagttgatcccttacgcccgcctgactgtttaggtgtagccgaggtaccaacaccacgattacgttttttaataacgtcggtttttaaactaaggggtctcacgacaccattgatcttcataaacaaaccacaagcattacacaaaggttgtccatcgggactgcgacgccacaatggagtggtacgtgtctgacaatttgtacaggtaggagtggggttagtggcattggctctacgggtatttgcatctccctttttgtcttcagcagcgtttgaaaccgttggcttctcggcgttcttattgatattaaatgacacagaacgatcttttttcgtatccaacgtagtaggtagtgcagcttgcggagtagcagcagtattggtggtgcgtttcttcaaacttgcagccatcccttcgggcagcaccccaggagaagttatggagttagcggaagtagcgcgatttaagtaaggcatatgattgtacatcccaggactagaccccattaaattggtatcctgagcacttactttgcgatgaggaacagcagaaaattgtggactggtttgatgaaagaaattctgcccaaagttgttagaggaattgctgcgtactggagcaacacccatagcggttccaacacgcatgaattgcggagaaaacatatcagaaccagggagaggactgttggatgaatgcccggtagtttcaccagatgcccattcagcactattgtggctcgaaatagaaggattaaatgattcagcattttcctgatttgaatcaacgccagaagaaccttgacctacagatttgcttgaattcgtacggaaagtattaggacgacgggggaattgagagttcgagttcggtacaggggccgagataggtagcgaactaaccatattgatagatggcatactgacatatgatcctggtgactggattaatggcgacgaaacttcatgattgtttctagagacatcaaagatattatttcccgaaacatcgggaaaaaatgattgattaggtgtgacaccagaacttaaaggtgatgaaattccaaaaagcccttggctattataggatgagctgaagccatcttctgatgcagtattagcatgatatgaggtggaaggaacactgcctggaatgggaaatccagcagagccatgctcaaaactaaaggagttggtggcggaagaaggaaaaagagtttgttcatgagtattggcgtcaacaaatgagggaaagcctccattttctggaaatgatgaaggttctgatggagtcatatcaaagtccaatcccaaaacatccgtatctgcatgctttggagaagctttgatacgctgattaggagaagcagaattattagaattagcgggaatggaagggggagcattaggcaaattgtgagaatgaacactaaaaaagtcagaaggaggagatataggcaatgctgaggcgtcaagattagaaaaattagagctgtcaatgtctctcttaacgaaattaaaagaattagaagcatgaatctttgggtagctaaatggttgggattccaaatcatggggtctttgcatagcattgggatctggaaaatgagaatcggcaatagagcgctttttactttttgcagtagactcgtcaaagcttgttttacgcacgcgacgctgaatataattaaattccatcaacgagcttccagtggtatcagcaggtacgctatatgcaggtattgggtttaatttcatttcagtatctgagttatcggcagtggtttcagcagaagaagtaggaggaacggattgagcactagaaggggcagtgggatcagagaaagtgtctggggttaaagtatttgaatcaccatttggtgttaagttcttttgcaaatttatagacattaaacgccatgtcaagttctcgacacgacgaccattagacagttccgactttgccttggaaaacattttccagaggtctgacatcgtggaataatcttctttggaggaagattcgtccgtggtagatttgtcaaattttttgacaagtgctggatgttccgcttccttgaaaaaattggaaaactttagatccataagtaaggttttatgcaaaaaatgtttaatcacaaagcagggatatatccaaaaatgatacccaaaaaatcagtaacttcagccagcttgaaatgtggataagaaagaaaaagggaagtttccgaataaaaaaccgaaacaaaaaataaacgaatgaaatgaacgaaagagatcgcctctcaaacgttaaacaaaaaaaaagttgtagtaaaaaatcacaaaaaaataataatataaggtaagatataaaaaaacaggaaatcttaagctaggaccaagaaagcttctttaaatggaaaacacgaaatggcagtgaataccaagacacaccaacaacgttgtttagttaggtactactttgaaatgattgtgcaaaccacacgagcgaaggtaaaaatagcaagaagttcaagttgctttgatatgaacaggtactttaaacaaaaaagacgtgaaccccaaaacaaaaacgatctaaaaaggggaaataaaacaacaaaaacgaactaaaataccaaaacaaatatagaaaaataaaacagatataagctagaatacaatccagaggtgtggtggaacaaaaaaaagtaatttgtagacagattggggaatggtggcgctatggcttcctcaaatcaaatttccgttttccctggaagagagcaaaaaaagaagaaactgcaaaagaaaacagatatttattgattaggtatgtaataaggaggagccaaagcttaaagaaatcaatttacaaaatcgtttgaaacgtttaaaattagtacaacctgcttttcttttttcgttgaggttggcaaagggacggcgttgttcacacccatctaagcgaggtcgaagaagctctcttcggtaaatcgtaaggtgaaaataaagaagcctaacgaaaggaaccacttttacctttttttagctagctatccaatgattgtgcgctatctcaaataaaaaccatatgattggtacactgactgttttgtgaagcgcaattgaccaatcatttctggtatccaatttttgcagtttcccttggttacttagccgaccgagctgaccaatgaacgagatcacttattagacgaactagaacaccctcttttagcctgctattttttacagaactgcatcgtacaatgcagtaacataggtttcgggagtgcagcccgagagtcgcaaaactcccatagcgtaaaatgccgaaaagccgtattccggatgcatagttgatacaactccaacacccacatattgaaagaagccccaaataccgcattgttgcagtaaaataagaaatagccccatctaattaagaaagagcacattcctacttcctttcctgttatatttctccttcattggggcactttgtctcttgtattctcctttttatcattgtcatttgaggtctgcatcaaaaaagttggagactcacataggaacgtcttcttccacagcatctgaagacttttgaatcctcgcttcggacataacgcgaccagacgccatcagaagcgaggcctgaagagcaccaagacgtcggatggcttctgcttgaattgcggtaacatgtaagtggttttccaaatgagacatgttggattgcaacttggacagttggtccaccaaacgattcatttgaaagcttttcatttgactgggagatggagatgaactgcttgttcgactagttggcacaatggtagaacgacgcatggtgtaaggtgaaagtgaaagaaggcagacaggtagatggaaggtaaacaaaccaaacgcgtgtgtgatgggcgagtgcagcttttaagacaccgcactaaaatgcaatcaaccttcagtatcgacaattaaaggagaccattacccacttgagtggtatttcaatttaacaaattgcagcgatttccaacaataccggccgacgttagtattcctcaaaaatgaataagagcgtaaaatagcgtggaaagagtggcagaaaaaggcgaccagcgcagcgcacctatcttttatgtagctgacaagaaggaaaagggggacggtaaatttttcgcttactgataaaaaaccaaactttcgttatatggtttagcgagacataatttccaagctaataagtaataccgaaatcgttccttttgctaaatttttcgggtcagttccgtggaaataggcaaaattattggtaaggatggaattatcaagttttgcataatttccatggaagtgtagaaggaggatgaagacggaactgatgaaaagtgctccaaagctccgatcacaatcatgttggatgaggtgctttgtccaaatcaaaggaaataaaaattctccgtaagctcgacatgctaggcatcttatgaggaagataggcaaatgagtattttaaaggaaaaaagaaatggaaagagcacgatcgttagacaaattacatacggaagtcaatgtccgtgcaagagaagacgcagcagcgtgatgtgcatccgttgttttaattattgtttgaattttcaaactttactcaactacgatcggaaaacctttttttttaataaactacttgtcttaatatcctcgggttttattcagtttcaaaagcatcgagatttcactacactggggtttatcttttaggtcccccacatctatcatttcacagagttccatttcatatcgacgctaggatggggtttgacatatagtcttcttatatgtgaaaacatatagcttttctaatcaggttttgttttttcgtttcagatatatcggaagtgagttgaccgaacaatggattttatcttagcatggacaaatgtatcaattccctggaaatgattctcttggaaacaaaagaaaggaaacagggatacacaaaccagtcgagacaaataaaatccaacaggaaaattgcttggtgtaaggaaatcgtcatagaatgctttatgggagtttgggaagtatttgtaatatttacattttttttctactttttttttttttaatttttttagttaatgtttggctattttcaaaggaggaattcctgagttagatgaaaattagtttttaatttgtttctttttttttatataatcaagttggttcatttagtaaccatgcttcctcataccgctttttctaatcatattcattaccattttataagtaattttttcaaacattcactcatccctttctaatcatataccccatttttattatagtttctttcatgaaaatgaatgactcctacactccatacacatacatcgtttcgtttcacaattttgtacgcttccccataaaacaaagaaatacttccattcaccacgcccctaacaaaagaaaaagaaaagatgaagcccctttccgtctatgtatatataccctttttcatgctcacacgtgtttttcctgcggtttatcattatcgcttatggaagtgataatggatatctcccagttgcttatttcctaaatcactcatttcttatccttattgcgctaaaaatgataacagtcgcatattttcctcgtccctgctaatttacgaagagttgattacttcattccaagaaagacgtaggaagacgtaggaatgtcaaattgcgatcctattttcccaactcatctcgctttcacttggcgttgttggcattcctttgattatgacggacatttacatccgtaatagatgattgcatgtaaacgaattttgtgctttgtcaaagtgcaaaaaagagctaccgataaacggaggaccgattgtgttgaacaactgcactgactaacacaaatttatcaatggaaaaaaggtatacgtcggcgatgctctgataactaaatgaaggcttttttttttccttttgcgactcgcctgccgccgcacacttactcatgttgatagctcaaacaaatcaaaatactaactttaacgccgacaatgctccacttgcatcttgtctatcttggcgattatggttacctcaaacacataccgtcttttaccacttatcactaacaactttgtggagcggattttcatcctaccttgataatcatctaccctcgcaccagtaccgcagtatttcttgataatgagaacggatgcagactagatggggcagtagtaaaagagctcgcaaaagaaacatgaaatttcataaacaaatgctgacgaaagtatatgaatgaaactaacattaacacaaatatgaaattgagatttgagtcaaacccaataattaaatccaaactttacatgaaactgactagtaccaaaaatgatcaaaaccatacaaatacagtctacccactttggctgagaaatcgcctatcaaacatgacttgcttagttggcccagtctattacattcctcgacatatccgtatacaaggaagatgatgatggaggaacacttgataacatgattaataaaagtctttcgaaatctaaagcattccatttgttatcgagcaaaagaatagaggtaaaaaaaagtttttgttgttcatcagaaggacctttattttattttttttttgggtctttgactttttctattgaggtatccatactaaaagaaacattagagaagcctttgcaaatcatcacttttctcttcttctcttttcttacttcgtttaacgatcttccatacgttttgtctttctcagcacctgaatgcgtaaaaaatgaaatttttaaaatcccacccccgttaaacgaacatttttcattccctgtcaaatgttgtgcttatcaattcattttgcgtaatcgatttctcctcatttggtgtaattcagaaacaatccatcttacttatctgatagataccgtggtaattgaatcatccactttctggtgtacaggatcactgatatacattttgccgcagcccgacgtttttatctatcagggctcgggatccctacgaccctcgataattgactatccacgtgagtaatttagcctacattagtgccccgaggcattgcacagatgcgagatgtcctattgtactccgagaaaaggcccctttcaaattttcttctttgcgcttctttctactgggatctatccagttcgccgcggacttgatatggaagtaaaagcattttatgcaaacgaccaaaataccaacttgattatcctttcttagttttgttatttgtatagatgaaatgagtgctatccactacgacaacattcaacaagtcatcgtagcacaaaaatacattctccaatactacctatatagcatgggcaaagaaggtacgacggaatgaaggtgaataacgaagcgacttttcaaatctttaaaagagtttacagaaagttcgaaatagtacctagatgtctgcaatgttttttaccatttttttcgttaaaatacttttgcgttaaacagatatctaagtgcgtaaaagtattttgatcatcccttcgtattgtgttatattcgttgcgttttctggaaaaagttattaagtgcttcgttattcaaagagggtctgtggctttttttttctttcagaaaaactaatacactaatgtatataacgatatgtatgattcctttggtaatccagaaaaggatgtaaattcacaacttgaatgtttggtatgaaaggatgaatgtggctgtctaataataagctgtttattttttttaaaaaataatatctaattaacttcgagttgtcaattgaaatggcttctgcaagtcttttttttttttttttttttatacctaaaggcctttttcaagtttactgatttgcgaccaataccttaatactacatttgctccgtcaaaaagtttgtatgaactaattttctcattaccagccacaccataaatctcgagaatgtacagtaaaaaagcacaatggctagtgtctgctgaaagttccaggacctaatgaaactccaatgtgcatggacctataattaaaaaatcggaattaaagctaatcaacataaaatcctttatactgttaaagtttttatattttcatccttctacaatctcgatgctccccttaaattacagcataacaggaaaaatcgattttctcacaaaaaagacatcctactgtgcaaatcacaacgaagtatggagaaaaaagaaaataaattaattacgaaaagattaaataaaaaaaatgaaaatatttgtttctcccagcaattcatatacgcttaaggaatgtcctcatgaacaatattaaatccatcaaataataaaaaggggtatgtaataacataagtttgatattaggcagcataaaccatagaaaagcttcaaaatgatttctaggaataggggtttaaggtatttcatacattttttgggaataaaaccattaaatcaaggaaataaagcatgtccaataatatgatacattttcatccaacactaaatggcttaccaaataaatagaggatgacaataaaaaacagaagtaaaaaagtaacagacaataacagaaagaacattgtttgagttaaaattgaaacactttttacgatataatgcatgattctctgtttttagaacgcttgaaagaaagcatactcaatcgtttcttcttcttaggcagactttcactgtttcgagacttcctctcctcgttactgatggtgatggaagtcttctcaaaaacatcttcttttccaacgtcttgcacaaaggtagacgctagatgatgattcttgtaagctgccgctttcgcccattcgttagcaagctcgggattgggatagatgacatcgtcaactccattcaaataaaactgggaaagtttccacatagcttcaggattcctcttcctcgctaatcgtcgataccacacaaagctccgaacaagattaatgtcacattccagttgaccaagctcaaaacatcgagccacacgaagctgtgcatctttcaatccatacttggcagctatgtgatacaaaacaaaagcctttcttgggctcaactctaataatccatctaaatacgaagagccgtgctcatacagctccgctaagtcataaagggcctgaggaaattcatgatcagcctcaagagctcccaaattcaaatagtacatagctttcactggatcacgcttaactgacatcaaaccacggaaatagatgagggccattctatgcatggcaccaacgtgttgtccagacgctgctctaaagaaataatgaatagcttcttcagtgttctgggtcacaccaaatcccatctgcagacatatggcaaccctataggcagcctgcacgtgattcaagtcggccgccattttatacagtcgatatgcttccttctcattaatttccgttctcaatgcaccggttccatagcatacagccaacagataaagtgcttctgaatagccaaaaaaagaatttccttgagatacaaacgaagtcaaataatcaaaagcctcctcttttttcctagcaacatactctctgttgcggcgactagaggatttttccgcttgaagagcaagttgcaaaaaagaaagtctagtttctggttcacacatctcagcactggctaacttgtatgaacttttcaactcctccaagctaatgctttttttgaagttgcggaacatttcatcggaaccgggatcggattgcaaagagcgttgattgaatgcataatctggatcgtaagatggcggttcaggatcgaaaagaccactctttaaatttaaatttttcacgttgatagcggaaaaatccacggcagatgaaaacgtctgttccgatttttttttcgacactatttcgagctctttgaaggggctaagatttcgctgtgactgaatattcgatgcagaatcggaaaatgacggtacttcatgaatcagggtattggtaggtacttcgtcaaactcttccgatttcttaaactgagccaaaggatgaagataatcatcgttagagctaatttcaatggcatgggtgtctgagctaggctcgatatcataatcaattgtcgttctgtcccactcgtgagcactcccagtgccgccattgctaactagcatttctatggctttaatggttataatgccttctatcttctatttcactttcaaagagcgaggaatgaaaattgaattcaaggctgcaactggatataggtgaagggtaaaaatttatctgtcaaactgatgactcgatccgagggtcacgtcatgaagctaacgaagcgacgttatatcgtcggacttaaaagtttatttgaatataaactacttttaagcgtacaggttgatctacctacaagaaagatacgtttacagtagaattttcaaaattttagtgggttttcagctggattaaggatgcagttctctctaaacagtcaagaattaactatttacttataattaatattcatatctcccttttatggagaaatatgctgattagtttcgagcggaatacgctgcttggctcatcgattccgaatatgctgtggctcagaacgcttttcatgtcgcaataacgagacttttcggcgtttctcaatggtaattgatgcgttattatctggatttagagcaaaaattcatacaggtctttgccttttctttccagaagccgatggactcttgatgacttagttttgtgaccctttgtttttgatcgcttgtcctcatccaggtcctcaatagcagtggtgcctttgttatgactaacggtgattaaatccttttgtttagtgctattatttttcttctccggtttctctttgcgaagttgtcgcttttcacgatgccgacccaccagtggctttcttgcgttgggtcgatacttgaaggtgaaaccaagaaattgtctttgattaccgttcataactccattgctttttgctttttgctctgccttcctttgcttttcgtacacatctttgtacgcatctagtacctgttcgtcattgaaatcatcaaaataggaagtatcaagttgattctccaagcggggaacaaatggtggcacagctcttttccgcaaaccgttccaatggagtctcttaaaaaatggatgcttttggatttcgattgtgctttgaaatcttgacgttggttctgttagacacttggtgatgaaagaccatgcctcgtctgaaaccgatctcgcttttttgtcgtaaattccattttcatttttggagggtctctgcaacatttctcgccagtagtatagattagtccacgtttcttggagcgttgacccagaaaagggaggatatcctaccagacattcataacatatgcagccaagtgaccagtagtctacggtcctatcgtatttctttccgtaaacaacttctggagccatgtattcaggagatccaacaacggaatttacctaatttttttttagtttacgtttgaatcaaaatgtctttaccttgttctcattcttttccaaaagcgctttataaatgtttcttctttgcttttgtgttaaataaggtctctgaggattaaccgcgctcactagtgcatgttgaagtcgatttacctgattcgatgtaacaattgcagtacttagcccaaagtcactaagcttgatatgtcccttttgatcaattaaaaagttctcgggctttaaatcacgatgcatataacctagtttgtggactgcactgattgcagcgaccatttctgctaggtaaaatcgggtttgattttcatgcaaaagccccttggtagtcaaaaaagttcgaaaatctcctccagggacgtattccattgctagatatactttttccttatcttgaaaggcataatacagttttacaagccattcggaattagtattcgttagtatatctctttcattcaatatgtgtttcacctgagccgttgttagttttcttttaagatctttaatagtgtcttcttacttcattaagttgctgtaatgttgattttttcatcattttcattgctaacaattcgtgtgtgttgcgctttttagcaagccacacagaaccatatcctccttgtccaagctttactaataaatcgaaatggctacattgaatcttggttcttttttttctcaaaaatgctctttcccttccacaatgctctttccatagtcgcttctgtttagattgttttaatgacgatgtacacgctgtaaattcttccaatctttccttccttagtttatggtactcaattgtgctaatatagtaattgaggaagaaaacttgacaggccatccgctttcttcttgtctcgggtcgactaagtatttcaacttcactgggctttagtaattggtagtaagttaaacctttaggatcatttcttttcgtccagcaattttgtctttcttcgttgagcaccatgcgttcatttttcgaagacacacttgctgacgcattttccctgtctcgtaaatagccgcttgatagtaaaaataaatcagaaaattcgactccattttcttttgcctttgatactagtttgttattgtctaattctttaaggcccagtaggtccattctatgtttgtggaatcgttctataaaattgtcccaagtgaattgctttttccatgcaatggattctttcctttttttgctcctattcaagtttatgtgagctcaattttgaaatttattttgagtacacgttgtgcctgaataaaactcgattctcccagcaaatgtaaacaaacaccgggttctgggaatttttacaaagatgatacatgcgcagtaaaatttacttaaaaaaggttaaataaaaaattatatttcgaattcttttgcgcgattaaaataaattttttttacgaatatgtgtgattatttcctttataatcagggagatacaaacaccaaaatggttaatcgagaacaaaaaaaaataaaaaataaatataaatcttggaattagcttattttgtcaattaaattctccaactaagtagatatgtactggtgattaagaaaagctatatacttcaaccgcaaactatccagattattatttatgttcttgtgatgatatagaaggagacctagaattgctttctttatccgtttttatttgccttgaaagactcctgttttgtcgaatcaaatcttgaagcctttctctggcacccaacttgtctcttttacgaccttcttgctcagccttgagttgaaactccatctctcttagtctcaactgccatatatggctcattccttcagcatctcgtttcaaagctgtgatacctctttgaactgctgacttatctggagaagcgggaacaagctttttatcctcggaatccaaactaacgcgttttgaagcccttggcgaatttggaatagatgaagttgacccagcgcctaaaagtttcactcgttcttccaactgtgataaacgcttacttctagcctcaagtacaccatcaagcttcctgagttcggtcttaaattcccgctccattgattgacacttccgtttgaattcttgaatggatttgtccaactccctaaaattcatatttactgcctgattcatgcttgaaattgtcgtcaatgcttcaacgttggtatttacaggcttacttcccgtattcagttgggtaaaacgagtgacaatgttttttatgagggaatttctttcttccacttgctctttaaggcgtttttcagatgcttgtaaaagtttaagttctctagattgactcctttcagaaggactggaagatccagagaggtttcttctgaaagcttgtgaagacaaattttccaactctaattggattgcttttttggatcgtctttccgcatccagtaagttctttaactccttcttttcagacactaacgtctccaaagagtttgttttttcttttaaactttgctcacaatggtagatttttttcatcaacttatcagtaccagactgatcctttttattctcatcttttagttttcttatctgttgtaccaaatggttaaccgagcagtgggtgacctgtttatcaaatgtttccataatagcattctgcaaagaatcgaaattttcgcgaagggtaacgtattgattatttctttcctcaatctcactttttaaagaagagtttgatgacaatataccttcaaattcacgaagttttttatttaatgaatctaattcgtcattgtgcctttccttcaagttgctaagataatcggctaacgattctttactcgttgtaacgctttccatttcagtttttaactgactaagttgatcatttaacgactcaatttgctcattgagtaaaagtttgttatcgttacttttcaccagctcgctttctttcaaagcaattacttgcttgttttcttcattttccttccttaaagaatcaacttctgcttctgtcattttcaactgttcaagaagatttgatgtctttgaagttgaatcttccttcgctttattattttcttcttccaaagtttgcagccgcttttgtaattcgtcaaattcatggcatttatcgttataacgttctgacaattgggtaatttcatcagtaagcttttcaacctcttctttgaataaagagatactctcctcattttcccgtattgttttctcgaatttctcaatttcacgctctgcttcagtcctaagtttacctactacttcttcgtaatcatcagactcttttgaagactttgacagcacctctttggtatcctggagttcttgggtaatctcttcgacatattcctggagttggtcaacatcttcccgccattgttgctccattctcatcaatttattttcataatcctcttcaatatcttgcaactgtttatataaacgagtaagttcaattgattgctcttgggttttcattctagataccatcatagaatcccacaattcattcttgcttgattctgcctctacaatcgcattcatcttccctgaattcaaagcaacggtaagctcctccacttgtttaaccaggcgatcattttcctgcttgcgaagtagtaatgcttcattttgcatagatatgtccatcctcaacagttcattactacgctgaagtgtttcaataacacgctcatcagtattttttgcaggcataggaacttttttggataactgtacgcgaagggattccaactcttgcaatagagcttccttttcccgccgttcgttatcaagcatatttgacagtacattacgatcttcattgtatgccccaacagaataattcgtcttctttgatttttcttttctcaaagccgcaaacgctcttttggtagtttcaagctctgaaagagcctgcgaatacctcgattgaagagtaattaggtttgaaggggccgggctgggggtggaaaggttaaaagactgatcaggcttaatccggctttctaatccagatatttttttctcatagcctgcaacggctcgttgaagctccatagtaagggtcttcaaatcgatgttttgcttcataatatcttgaacctcctgatcgtggaatttatttaattgatcgtatagaaagtagcatttcagtttcaacccaaacacttcctttctcaaattatcaatcacgtttgcttgttcctttaaagttaaggaggagccgggctgagattcctcaaactctttggcaagtgcatttttcctgtcttttaggtctttcatagcagacgccggtatcaatatatcggagatctttttgcttaaagcattggtagtgggggcatcttgagaatgtaaataatttcgttcttcttttattggggttaattgcaaatcatcttcatcatccaaatgaggtaactgatctagagaagaagagatatagttcggacttgaagggtccgaagtataatcgtaattattgtaactatcttcttcatactgctcttggctctgaaacccttgattagccgtaagtacgggagaaagctgttcatcatcagtagtaatgttgtcattgagacgatcaaaattcgtagtatccaaaaaaaaaggtgcaacagaactatttccctcctcgtcctcgctattcaatttattgactgattcatcgggagattgaagcggagtagagctcgttggagcagtagcattttgatggagacgaggtgatccagaatcagattttaaagaatctctatcaatttcaaaatcatacttatgagaagcttcttccgaatcttcgtcttttgatgtagaagagggtaattgccgagatccttcctttctgggtgataaaatgcgacgaacttcctcgtccgtcagcgaaagaccagctaaattatccactagaacattaaagttattactatctaactcactggaattttcttccataattgattagaaaacgaacttcgacataagcaaatccaaagcagtaggcattgactcttgtaacaatttcaaaggagcgatttttgaataagaaattaattctttcttaaattgttaattgttaaaagaaagtatgggatcgaagatatgcctattgatacgctatggcatatatgtagtggcagtagttctcaatggctgtctctacttgacgcatgttagactaacgatcaacaaagtagtagacttgtaattgcggactttacaattttagaaggtttaatgtttgtgttagaagcagatattttcaaaagaagttaatgaaattaattatacatttgcacacactcgtttacattataaatagccatgttatttggcatgcctatggcacatacacaaaacaatagtacatacattgatgatatgtaaaacgtaactatgattttcattagattaactctcctcaagttaaggtatgttaacctcatttcacactgtgaatcctaagtatattaattattgatggaataaacgttaaaaacactaaagtccgctacgattatgcttgagtacataggttttcacgaacaagcgtaaatttgctttcctacgtatagttggtatgtagcctgaaattatttgtttcagtctctattttcaccgtgttacatgatgctacatttcgatgatttcaatcgcaacggtaaattgaactatgaatatacgaacaaatatacttttcattaagagaacatttttaatttgcatagtgtgttcgaaacttgaattgagtgaatgcgaaaataaagtcctctacaactcatcaacttgagatatgtagagcagctgaaaaaaaataataataaataaataagtatatgtaaattaatttatctaagtaaattaagttaatactactcagtattttttttaatacaacaaagaaaagcattctttctattaagcgaaggattttttttttttttaaatcaattacaatcatcacttactagaatgaaccaactagttgaaaactttcttttcttttcaatttttttttttattcaagctgatcattgatctgatatgttttcttcaaacattaattccatgaaattgtttaaaaaaatttgcgaaaaaaaaagttgacaggtatgtaaatattactaatatagattattacaaaataaaagagaaacttggcatcatcactcgctctacataatttttattaagtaaaaatggtaatacataaaaactgcttcaaactcgtcagttacgtactctgctaaatcggttaaggtgtcagcaatattacatacgctgcgatacacaacgctgaatatcactatatgctacatattctaattataccatagatgatacgatattacgattgttcctaatgaaattataataagttctatactatctgaataatgcaaatggaagcacaattgaaatgaagaacgaggatcagttatacgctatattagtgataggtaaaaatataacctgtataacagaataactataccccagttgcgacctttatgacccgcgtattgcaatatgaatgattataaatatgtattaagatatttgtaataatgtaatacattactatgaatgcacttaaattaactcgcgaatgaactcataaacggagttcatttgagtttacttatagaaattcaatgaaggatatatctatattcaccttatataaatgatgcgggtatataacgatccaatatacaatcattacagttctgactctgaaaatatgatgtccgacagcagctatctgaatgcgattatgccgaccctatgctaaattcatttagtgctactgcatcatgttatgcgaccaaaaccatattattgccagaggtcatttagccacggaaagcttacaagcaacatatgttgaaaagaagagttacagcgtcaaaaatcgttcttaacaacgcagtgtggtattagtttaacgagacataaggaccgcgtcgatttgttcatggcatgctttatctatagtgatatctttaatatagccttacatttacaatgatatcgtcatacaaaggacgccgccactaaacacgttattttatttagcgacttctaattttgccgcttaatagtttttccacgtcgctaaccactaaacaccgccaaagaaaccgtggattatggccaccaccaagaagaaaaccaaagaaaaagaacagtcacattgtaaatatgagatttaaatacataaaaacatattattattttattttaagtactccttctgtattttcttagttgcaaaattttcattaagaaaatccattcatatacaaccaggacctccgctcatctaccaacaaccatttccccgggatgtctgcaaagagtgagaataagcagtcagtcaaagctcttgaagagttgttgaagcaccttactgtctgcgatgccgcagaggaagctgatgctgccaaggctttggcttcttttgtcaacggacccatcgaagagcaagacgcgccttctcaagttttctctgctatttccaagcagttgaacgacaagaacgccactgctcgtgagcgtgtcttgaagggtcttgaggccgttgccaaccatggtagtgttgccgctgatgtcgagccttacttggtcgagttgttgcccgccgtcatcgccaaggttgctgacaagcaaaacgctgtcagagatgctgccattgctgcttctaaggctattgtccgttgcactaccccttatgccgtcaaggccatcgtcccctctgttctcgagtccatccacaccactggtaagtggaatgagaagatgaactctttgcaacttttggatgttctcgttgaggttgctccttcccaattatcctactcccttcctcaaattatccctgttgtttccgagtccatgtgggataccaaggctgaggttaagaagcaatccaaggaaaccatgaccaaggtctgtactttgattgccaacgccgatattgaccgtttcattcctgagcttatcaactgtattgctcaccccgaggaggtccctgagactattcactctttgggtgccactactttcgttactgaagtccaggcccccactttgtctatcatggtccccttgttggcccgtggtttgaatgagcgttccactcccattaagcgtaagactgctgtcattattgacaacatgtccaagcttgtcgaggatcctcaagtcgtcgctcctttcttgcccaagcttttgcctggtttgtaccacatcaaggacaccattggtgaccctgaatgtcgttccgttgttcaacgtgccatcaccactttagagcgtgttggtaacgttgttgacggtaagatccctgaggtttctaccgccgccaaccctgaagtttgtctcgaaactttgaaggctgttctcggtgagatcaaggtccccaccaacgaggaggttattgctaagtacgttgctaacattgctgcccaactcgttgaagagaaggataacgaaaatgagtcctgggttctcaacatcactccttacttgactgccttcattgacgaggcccacattcacaagatcgttgagcaactccgtacccgctctatcgccaagattcctggtggtgcttctcatgctgaggaggaagaggagggtgaggatctttgcaactgtgagttctctcttgcttatggtgccaagattcttcttaaccgtactcgtctccgtcttaagcgtggtcgtcgttatggtctttgcggtcctaacggttccggtaagtctacccttatgcgtgccattgtcaacggtcaagttgaaggtttccctactcatctccgtaccgtctacgttgagcacgatatcgacgagtctgaagccgacactccttccgtcgatttcattctccaagatcccgctgtccccatcaaggaccgtgatgaaattgtcaaggctttgaaggagaactctttcaccgatgaactcattaacatgcctatcggttccctttctggtggttggaagatgaaattggctcttacccgtgctatgttcaagaaccccgatattcttttgcttgatgagcctaccaaccatcttgacgttgtcaatgttgcctggttggagaactttttggttaaccaaaaggatgtttcttccatcattgtctctcacgactctggtttcttggaccacgttgttcaagccattatccactacgagcgtttcaagcttcgtaagtatcttggtaacatgtccgagttcgttaagaaggttccttccgccaagtcctactatgagttgggtgcctccgaaatggaattcaaattccctgaacccggtttcttggaaggtgttaagaccaagcaacgtgctatcatcaaggtccaacacatgtctttccaataccctggtacctcaaagcctcaattgaacgacatttctttccaagtttctctctcttctcgtattgccgttattggtcccaacggtgccggtaaatctaccttgattaaggttcttactggtgaattgttgcccactgttggtgaaatttaccaacacgagaactgccgtatcgcctacgttgcccaagccgctttcactcacttgggtcatcaccctgataagactccctcagaatatatccaatggcgtttccaatctggtgaagatttggaggctatggataaggcttctcgtgtcatcagcgaggctgatgaggaggctatgaagaacaagatcttcaagattgagggaactcaacgtaagattttgggtatccacagccgtcgtaagctcaagaactcttatgagtatgagtgctctttcctcgtcggtgagaacattggcatgaagagtgagcgctgggttcctatgatgtcttccgacaatgcttggttacctcgtggtgaacttatggagactcacgctaagatggttgctgaagttgaccgtgctgaggccttgaagagtggtcaattccgtcccttggtccgtaaggagattgaggagcactgcagccttttgggtcttgatgctgagttggtttctcactctcgtatcaagggtctttctggtggacaaaaggtcaagcttgtcttggctgcttgtacctggttgcgtcctcacgtcatcgttcttgacgagcctaccaactatcttgatcgtgactctcttggtgctctttccaagggtcttaagaactttggtggtggtgtcgttttggtcactcactcccgtgagttcactgaaggtttgactgaggaagtttgggctgtcaacaacggtcacatgactccttccggtcacaactgggtttccggtcaaggttctggtcctcgtatccaagagaaggaggagggcgatacttttgatgctttcggtaacaaaattgaaaaggctaagaaggccaagaagctcactggtgctgagctccgtaagaagaagaaggagcgtatggctcgtcgtaaggctggtcttgaggtcagtgacgatgagctgtaaggtgtctgctatgagtcttttaattgtggaatcttacggtccttaaggttgttattatggtttgaattaattagatggtaactgtacttttgatttagctaggctaggaaattaataagctattgttccagtatacgactctaacatgtggtaacgtatgagttttttgagagcgaagtataagtctcaaaaaagatcattgttcaagttgacaattgttttatcaatatagtttgtcatgtaaagtgagtgtatatgaagacccataagtgtgtactacatgtatgttatcaatgtaatttctaaaaagctgctgttaattttcaactttggtaagaatcgatgaaaggcgttcgtcgtccagaggaagacaaattaacagtttagaatgtatttattaattatccattttgtatatactttataatgttttttttaattatatcttacttgaattttgtttttcgttatttttaaattaattttaattacatttggtaattaattgtcaattgaaaattgcagcataggtattctttgctaatactagaaatttggtgaggaacccggattattcttagaaaatacaaaaaaaatacaaagaaatgagatttaattaatatttgcgacagattgcttaactgttttttatatggtaagagaatagcggaaatttttgatattaagtagatgaaactatgcaaatttaagataaatagcataagcgtatttttttaggatataaaacaagaataaatataagttaaaaaaatataattaatcccttttaccaactagttttacaatttgtataacacaattcaaattctcgaataacagatttagttaaccttttacaaaaactgtgaatatatatcacaaatttgagatagctttcaagaagtcactatgtccgagtggttaaggagttagacttgaatcctgtattctagtcatctaatgggctctgcccgcgcaggttcaaatcctgctggtgacggtatttgtgcgcggtaggagagtggaactccgacgggctcataacccgtaggtcccaggatcgaaacctggccgcgcaactatttttttcatttgtttatttgactttaaataattttttgcttagttgttggaattgaataattttaatgacttgcagagctcgcttcagcttgaattgtgagtttctcatctaatcttaagagtaaatagttcagaagtgtgaggacaagtgatacttttagcattggagttctttggaaggttgttgaaataaatcaatgagtaaactggtcaaggaaaaaaaatccctttttaggaaattcgcataaaaatgatatcctaaagttgtaacaagaatcagaacttgcaaatattgaatatcgatcaatgcagtttctcaagcatcgtgactgagaaatttttatcccaaaagtatagcatttttatgttactatcgacattgcaactactgcgactattgcagatttctcacttagctgatgctttacactgaacattgaggactatgggcgaggtattcattcccattcattgcaacgaatatttgccaaatgtagaatcaattgaatatctgttgtgttttccacataatagtctagcaaatcatgagagctatttcaagctatgccttaattcgaggttctgcaactgcagcatctgtatcgctcaaactcaaaagcattatatggcatgggcaccggtttttcaaaggggccttattcgcttctaaagttgcgtttaaatatgtgcaccaaactccatcttgcgattttgaatggtaacataggtatgcaaaaaaactctctaaaccgaattcgtttatcctattttaagctctgaggaagcatgattccatgaccgaaatatttgagactaaattgacaaaacttgacagtcgaatacttagtcatcaagagaagccttttctttggtagaaaagttgaagagaaatatacaaaagcgttataataattgttaaattttgagtcaatcaattagttaaatcgtccaactagaaactctttaagggaatattggctgaaataaatttaaagaacctttatccattcccctaatgaacgctataaaaatcatttattacattatcgaacgtctacggccatacctaggtgaaaacaccagttcccgtccgatcactgcagttaagcgtctgagggcctcgttagtactatggttggagacaacatgggaatccggggtgctgtaggctccttttttttaatcagttagttgaattcatttctagttattatttttcattcttgattgcagacgctatccagtatttccatagttatcgtttacacaaggaaacttatatgagactgtgaaagtcaaaaggactatacgttaaaatgattgtcaattcagcttgtttatgatacttaaaatattgaattgctaatatccataaaatgaaataacgaaaatttctatcatactcagcgaatcgcaactgtatatgtgtatgtacagttttctgttcaataattcaacactcgtcaattgaagcctttaattcctttaagagggtaattagaaaccaagctaaaacaattgcttctaattgagaaccattaaaacgggtttaatctagataagacaaaaggaaagatacaataaagttagaagtaaaattgtgttaacagttatgcacgttatgtattcattaaaaaatgcaactgcctattttttttatcttttgtttttttttttttggaaaaggatttggtcaaatcagcatgatttgatcatataaaaaaaggatgcaatgtgaccatgggaaaaagggttaactttcagtttcatttgctttaatagtaaatatgttcagtaaggtagaccaactaggagaaaagaataagggtaaattaaaatatcgacctttttaaaattcaggtttgagtagtttcgaaagaaagccatcattacatgtctccatcgtcactagggaaaatgaagttatcagcggggagtaaaaagccaaaacccttcgcatcattgaaaagtgcctctagtgaggcattgatattttcatcattccaaagattttgtaggttgatttgattatgataatcagcatctctagggaagaaaggcacctgcgtcgaataagctggttcggtagcattaagccttgattgatatacctcgctttgttcagcaaatgcccgcaagttagttatgacatccgtacttccttttaaaagtggaaatctgtcggtaacaaaattcaaaatgtcaatagccgtattcagttgttcgatcgtttgttcagacgggttgattagaagatgcaccagaatgataaaagaggcggcatgacatgaatggtaatccataaatgaatagacagatagaaatttgtgcattcttagtagtacaaggaggtcgacaatgtgcaaagcggatgaatagcagtatgaaattaacttatcagtaagaagcctagctccctcatccgtcttactattcatcgttctttcacgaagccggtgtagtaagaacggtcggcccatggcaattcgaacaatatgataagctagatgcaaatgaacgatacctctgtaagacctgctatctgggccaatgttttgtatttctagatcaggagacagttgttggcgccatgcctcaatttcgtttacaatctctttaatggtagctgcttttaagttcgcctttccatgtagcgaggaataccacatgtcatagactttattagttagaagggaaattttaatagctaaggtgaaggtccggaagctggcaatgaagttttgcgaatctaaactttcacggtattctggaaaatgaatatcaatttcggaacgcacaagactctcgggcctgcccagagaaatacctatttttctaaaagttaaacgttagcataaaataatgaggaggaataataaaaaattctcttcttcttcccagacatgaatcttgggaagttttcaacagccttacctttccatgcaatatacactccagaaaagccgtttacgaagttcagcaacatctccggaaaattgagcattcgcagactttttgtgcataccattggcaacagcagctctcatagctataccaaagtacatgtatacaacttcgtgtgccaatgttggagacaaatacataccggctaggaagaaagactgtactgtttccaacgacgattcactgatgactttgggaaaaagaagtttggcgttttggtaaaactgagagccaggataagtccaacgatcgtgattttcatcagaaaggaactctggatggcgaatgtaggagaatagactgcccatggccatgctcagaagaagcatacacacaaaaccaccatcttttgattgaaaggaagttggatcatcgaaaagatgatggacttttgcagcaaacagcttggtattataataaaaatggttgttgtcactagaaaattgccaaaatgtcataagtaaataaaaagtgatatcctttgggggtaatgcatggattaaagaggcgacagtattatcggcgggatctaaaatatcttcaaatgttttatttcctttctattgagaaaaacgggttagtaaagaacagtaaaatcgatgatgccccacaacatagcaagggtatgaaatgaagtagatgaatccatcaatacatacgttagtgagtttatgctgcacctgaaattccctgccctggcaaatgatctcgtgcacgcgagcgacgaagctttcgttagagccggcatcttcgtaatatgtctgtgtctcattcaaagtcacttgttgatagcttccaagttcgatgtcggtaagtactttatcaggataggtttgaaggctttcactaagctccgcaatctttgcttccaagctgggcaaatccaagctcatacttggcatgagtttagaaaggatggtctccatatgactgagtctctgaagattgagagaaatttcgtctttattcataagcaatctaggaggagtttctattacgcattctaatccttttttaagacatctgccacagggaaagttaccgacgcatttgattttatgctttttgcattccacacaactaatattagcatttgaatgaatagacaaaaaaaaagtagaaaaaataaaaccaaaaaaaaattgtaaagtaaggaaataaagaaacaactacataattcaatagatcaactaaataatacgaaaacaataaatatagtaataacaaacaaatcaagcaacttttggttggaatggcggctgatcgaacgcgtacaaactaaacgtctttcaactcgaccaaaacaaccagatgcatatttatttacatacgcaatagcttttcgaatcctttttgaaggtggaattcgctcgcctcttcttcttttcggttttgagcctccagcgctcttcttcccagtttctgctgtgctcgcgttcgcgttcgcgctgctgctgccaacaacaacattaccacccctttcttcttcctctagttgatcctccaactccatagcttcgcttctactcatgccactacgactcctatcctcatggggctgcatcctagcatgcatgcagtgagaatgcagcggaactcaagcatttactattctaagctatttatccaaacagaaaaccctcgatttttgtgtatggaattcactccagcaactccagctccagttctcctcgctctcggagatctcggggcccatccgttaacagtggtttgcacgtttgcgtactcgcccattatcttggaaatggcggcatgcctagcaatcctatcctgatagccccacggcttccaccgcatttccacaatcactgtgcaatttttagagaaatatcactagcctttctaaatccgaaataatgaccttgatggatgacactatcatttcttcttggtatacccagtgtcttagtgtattatatttccggtggctatagccgacttagacatctattgctatcttggtggaatcatatctaagcatggcgagcgatcagtactgttttacactagtatatgtggtaagtggtgataagctgcgctatgagtgcttggacgaaaaatttaaaaaatgagttgggagctcgatgttagcgttgggatgaggaaaaatcaacgtatgaatgatatgcgtcttgatttccccatttctcatcaagaaattcctgcaaagttagaaatgcaagacccaatgttggctcgactgcttaggaagcgtttcattccatcatttatttattttatcaagtatttacggtttttacgcccctgatatccgatcttggatgtttgtttaaacgatgaaacttgacgaatagataggagactgacgcatcaactttgccaatttacctaacattatcaagttctcctatatctccgggctcagaagatctttggaggaacaatggggtagcacgatatcgggtatttagtgctaaaaccaggtagagttggtaggtattgcaatgtttaatgataggtgcaacagtagaatttttggtatgtaggaaaatgtgcgatgcagtgaacatactcgagattacaaaccgggtacaccaaccggagggtggatgccagataaccaagtcaagagcttgtctgcctggtttaaaaggaagggatcaccttgcaatgctacaagccaatttcattagtatatcgatcctcaataagaaaaacaacccgactacactcattataagtgttggcgaaaatagcttttactaaatttcattctcttttccctcctctaattttaattcttttttcttttttccctttcctttctctactacttttagacatactaccataatcccgcttagatatttaagcgcctagcgagaaaatgtcaagcatcagtatagacgaaaagctgaaagatcccgagagtgtccaaaataaggaaattctcgatgtcgacgttggcgatctctcgccaaaaggcgtggatgctgctttcaattacgcccttgatgtcgactacgatgagatcgatccagaaacggagcgtagattggtacgcaaaatcgattgcacaatcttccccgtcatgtgtctagtatactgcatccaatttttggacaaaacttcaaattcctatgccgttatcatgggtctcaaagaagacttgaagatggaaggtcaaatgtatagttggtcaggtactgctttctacttgggttaccttgtcttcgaattccctgcatctcttcttcttcagcgctttcctttatccaagaccttgtgtgttttcttagtcatttggggtttcttgctttgcatgacctcagttgccaactatcctggctttatcgctcttcgtgtgcttctcggtatgatggaatctgccgccagtcctggtttcattcttctcactgctcaatggtacaagcgcagtgaacaacaacttcgtacttccgtatgggtcgcttttaatggtttgggtcagatccttggtagctgcatggcttatggtttggccaagaggaccagtcttcccatgagaggttggaagcttattttcattatttgcggtgtcctcgccattttcttgggatttgtcattcttgccgtcgttcccgacaatcctttcaaagcctggtttctcactgaagaagatcgtaagttggttgtcaagcgtcttcgtgccaacaagcaaggtgttggtaataatcactttaaattgtatcagtttaaggaaaccatgcttgatattcgtacttggattatgtttgtctcatccgttcttttgaatattcccaatggtggtatcggtacattttcctctcttttaattaaaggtaccatgggttatgatacccttcaaaccttgcttatgggtcttcctgccggcgcttgtgaatttggtggattgatcgcctttgggtttttgagtttgttcattcataaacgtatggttttggctaccatcaccacatgtattgccttgattggatcctgtttgctttctttcgctggtcctcctcgtgcacagcttgcaggttactatttattgatggtttctccaggtgccatgattgtcatgttcgccatcatttcttccaacgcctctggttatacaaagaaagtcactgttggtgttatctatcttatcggatactgtgtgggaaatttaatcggccctcaaactttcaaagctgctgacgctcctgaatatatgcctgctaagaacaccatggtcggttgttatgcagcaactttagtcacatttcctgctctttactatgttaattggagagaaaacaagcgtagggatcaattggctgcggagggaaagattgagcatcgtcccaatgctgaatttgaagatcttacagattttgagaatcttgatttcagatacactttatgatttgtacactttgcaggtcattgctttctaattattgtatactactaatgagtgtacggaaactaccgtaataacttttcattcgagttattaaagcaggttttagtcgtatattccgaaatatttctttcttagctggaatacacttttaagagaaagaaagtttctgtttttaggaacactattccttttaattattttgattttccttgtccatggtttcttgtttaacttgatgtcgtcgattgacatattgtgcttgtatgtttagctttattattaatttttgttattattttcttattacgactttaataatatactcgtcttacgaacgttactgaatactgtagatttccaagtagcaaaagtccccgagactttttctcggaaactcacaatatttaagataaatttagccttctatacatatattaatcaacctaaacatcaattgtaaatatctacgaaccaacaaagaaaactagaagaatgcaaatgtcaaataatcagatcatagacaaattgctgttaagaataacctcaaacaaagtttgagcttcatagcgacttaaaagcctgatttgaaagttttaataaactattgtcacatttcaacatcttcaaatagggcagtataaacttgtcactttcgtctgctcagttttaagctccaattcatttaactgaaatgcctatgatggaatatttctcatataaagtaatcatttacatttattttgtgttgtggaaatccttaaccattccatttcatcataacaaaatcaaaatttcatataacctaaatagtagttagtcaacattgcaagaaaaatgagtgattcatcgcctcaaaaaaaattctaaatctcttttttttttttgtttaaattagcaaaaaaatagaatataatttgccaatccaataatataaaatttatattctaataagagacatccttctatgaatccatgctttgattgttagcttaaacgcttccaattcggattctgtaaggacaagtgaaagtgtaatcatcccccggcgagcaatccaaaaaccttcctttaataaatccatccacaaaagatctttaagttcaataacctcaccagccgtatcattgtaagaatttacgcgaccagattcagtgaaatgaatgttcataatagatcctaagcctgtaatagacatcttggtattatggcaataagactcaatatccttgcggagcccatcccctaacgcattgagtctttttactgcttcgggtgtatataattcagtcaatccaacgtatccagctgtcaatgtaagggtgtcgttgttaaaagtaccagaatgagataaagaacctggtaatcgaggatcgaaacaactcataatatcggcgcgtccaccaaatgcaccaaaaggaaggccaccacccaagtatttgcccagcgtagtcaaatcaggcttcaaacaataaatttgctgtaaaccgccggggctaagtcttgaggtcataacctcatccaatataaatacaatgtcatttttctcacactctagctgaatcgtctgcataaattctttgtcggctggaattgcaccacccgctccttgcatcgcttctacaattacagctgcaatgtcttgagaagagttcaccaattccttaaattgtgtgctattgttgtattcacagagaatgaaatcttgactatccatattgtatggtgaaataccatgcgcaaagctcaatggaccgccatgataacctccatgcattgcgattacagccctttttccagtgaatttcctagcagcaattatagcagtgatattggcttctgttccagagttgcagaatcttattttctcaatgctgagaaagcgacttttcaacgcttctgcgtagtttagctcgcaagtagtagttcctcccaacgaaattccaatttcgtcgaatccctgcataagcgctttttttatcacaggattagaatggccgtaaataccagcagttagctcattaagaaaatccgtatactcatgtccatccacatctcgaagtttcgacccatatccagcttcaatgaaaatagggaaaggagctccatgaagaacagttctagtgtttccgcctggcaaagaatcacaagccttgcaatggaaatcattggatttcggatttctcgcaatgaattgagcctccgacttctccttggctaaactgaggtccgatatctcagaaaccatatttctcattatcgagagtcaataagcatgatagtcaacaaaatgggtatcttatatctttgatccaaatctaaggaacacggttagtgtacccgatccagaaatcggctgctgtacccgatatttggatcgttaaaaggaaggttttaggacgataaagatattattgttgaagaattagaaaatgtatgagtctccaattatcttaggctccaagccttgcacacttaatatccctggaatgggtgtgctgcatggattgactgttttggatgaaaacggtaaagagaaatgtcatagattcaccggcattcgttacgccaaacctccagtggggaaattgagatggagaagacctgttacacttgaagacggttatgactatagtggggattacaaccaatttaaaactatatgcccacagcctttttacaacaatcgcaagaatcaggttcgtaatccagattttaagtatgatgaagactgtttgttcttaaatatttgggtccctgctggagagaaaccagctgaaggttggcctgtactctattttattcatggaggatggctccaagtaggaaaccctctacactacagacagtgtgatccacaggatttgcaagcagatggttctccagctaagttcatcttggtttcaccgggccatagacttaatttgtttgggttccttgctggcaaggaactattggaagaggaccctaaaagcagtaactttggattttgggatcaacgtctgggcttggagtggacctacaagcatattgaatcgtttggcggcaataaagagaacattgcagttggcggaattagtgctggatcatacagtgcattgttccaactgatttacgaaacctatcatcctgaagctaaccaaatcattaagcgcgcgttactcctatcaaatggattgtcagttcaacccaagtcagtagaggaatctcaaattcaattcaacgagttagcccaaaagtttggcattccattggaactgagcagtgcggaaaagcttgagaaacttcgggccattccctttcaagatttagcagacaatattctgaatcttcgtttgcatacattcagagctgttacagatggagattttgtaaacccaaacacttttaaagatatatacgacggtacttttggtaaaaggataagagattctggtagagagttgattattggtgaagtaaacaacgagcattccatttatgcaaatacaaatccaccaaagtccaaggaggatttgtttaaccaagttaacaactattatccagagaaggttaccaaagcactcttagagttgtaccccaaagtccccgatatggaagatgaaaaggaatacttagcagccattaaggcccttttcggaagcatcgtctctgacatgcaagtctatgcttccaccagagttttaattaatggactcgttaaaggcggagttcccttggagaaaatatacaggtatcgtattgctttcagaggaaagttctttgataagtatgaacctcccgagagtcttgttccccatgctggagatttaggtctttggttctacaatgttgttgatggtattttacctgaggaaatccccatttacaaagcatggctaaaatcttatggagaatggatgtctactggcaagacagattggggcacaacgaagaccgaagagtatcgtttgttggatgcagatggcaccattaaagttgtggacgatgagaaatgggactggggtcttaaagttggccgcactgttgctggcgtatttggtcttaattaagtgagcgggttctctccaatgctaagatagcatttcagcaacaaggggtctacatttaatgatgtgaaatttttttttagacctgacttgtaatcgaatttgaaaataccaagacgtcagcaagctttttgttcaattcaccaatgtctaatttagctacaagaaaactctttgtttcacgattgccgtgtcataaataaccttgtatcttttagcaaacaagtcatgcttaatagatagttgtttgtaaataatgttagaaatttcagtacctaataaactttcattaatgttcgtttttctcaataaaatcttgttgattaaaagtttcatttcaattcatctattctttcagtagtgttgtttcatcatgagaatattaacactgtttgttttccatatcaagatgagcaagttcaattaaaagttggtttttaggttcatgattaactgtgatacaaaatggatgtctggtagtttaaggataaagagtcgttagaccataaacaaattctattattttttcttcgttggtggttcaagtgaagaaagttgtataaccttctgtaagacataatactgtggataataacaacaggtcgggtagcatagttggttattgcgcacgactgttaatcgtgaggtcgagggttcgagtccctccctgaccggaattctttttatctctttgaaagtgtttttctttttttttaatgtgtttactgttataagtatgaatttaagtcattgtttatagcaaaataccaactataaatttttgtttagtttacacaataaaatctacctttatacactgcgaatgtctacggccatacctaggcgaaaacaccagttcccgtccgatcactgcagttaagcgtctgagggcctcgttagtactatggttggagacaacatgggaatccggggtgctgtaggcttccttttattctttttgctttttgttttgaactatttttttttttttttcaaactagttatttaactaatgtatccatatacaactaacactgctctaccattgtaattgttctggctatggcattgccaatttcgcattgtattcaactatataactagacattgcaagacttgaatcgctatacaaagtctatacttattaaacaagtatcactcgctacacttactcatacattttatttacacaactttttaatatttggaaaaataaaacattaatcaatattaaaactaacagtacaaaggaatattaaggattataataatggacagtgcaaattggaaaaaaagaagcaaagaatgcaaaatttaataaaggcacataataaaattagcaaagtgttacacaaaatccaattcttctttttttttttttttaagaacaaacaagtatgaagaatggaaattcaaatgcaaaacagagcaatcaaacagacaagggggttgatgaaatggttttcacagcaatgatgagagaaatgaatgtgaattataaacaaacgaaaaaaaattccaatcgcaataatttttcttttcattgcaaaatggttttaattctgtcatcaagagaagctgtaaagcaatttatttcaatgcataaaatttcaaaaacacagagaagtgtgcgtttttaagaattcaaacaaagctttttaacagtaaaaaatatttgttcttttcttttcattttaaacgaaacgaacaaagtatgtttccatccaaaaggcgctagcatatttaaagacgaattaggattgatcaaagttgataagaggtcgatccaaatcgatcagagtcgatcataataatcggacacatggctatgtttcgatcgcgccaaatcaataaaaacccaggtggttttagatggtacgacgaacggtaggatcgatatgaacattggggtctgcgagcaatttcttgcccatgctatatgtagcaaagccaacagcagtagctacagcagcacctaaaggatagagttcgacggggactttacgaagagcagcacggaaaggcatgatgaatgtaaaaaagtaagaatgtaaagaaatgagagtttttttagaaaatcaagagaatttgtaaaaaatcgtagactataaggtattcggtagagtacgttatagagactaactatatgaaaagtttgacttgacttaaaccaagtgaagtgaatgtaaagatgggatgttgaattgatgaaccaaagaccatcaatccaaggcctttatatagaaaaaaaaaattcttagcgactcttccatcgaagcgagcaagcgggccaccaaaaatggcagaaacccaataaaccaacgaaaggcggcgaaacgaccaacgtaaacattccattggaagacaggggtttaccccacaaaatcgacgtcaaagagaagtagattgattagcttattttaacgtaatgcacaactagacacggaacttttccgccaataacggagtggcgcgttcctccttcttaccgaaaaatgtcgcagtagccaatccactacatcagcggcaaccaatccgatgcgacagcagaaccagccaacttgttagtccgagaatgacgtgggcaaaaagtggagagtcgggggatggaaaggggaggacctcatttttatgatatcgtattaaggaggtgaatgagaggagagactaatggatgcaaagtagaggggggagggagtttgagaggagagaagaggtagaatagggacatcaaatgtagtacgttatagtataaattatatcaagtgcgttggaatgcgccaagtatgatgagaggaaggattttcattagagagagagagagagagcgagagaaactagttagtttctctaatagttaatagtaaataaaaagaaaaagccgtttgtagagaagatcatccaagaattatcgtttaccttttttgaaatcattaatcttttaaatttatttatttttttcttaatatcgttattaatacactcatactggaattctacttttgccaagatatcattttttcatcatccaccttttcccttgaatggcgtaaaaaaaaagttgcagaatggcattccgacatgctcgtagtttgcgttgcatttcatttccaaaacgttgctttccatcctataagtcataatgactgcatgactggtggaaaaagggaaaagaatgagaaagggaagcagaagtaccatagaaggaatagaatgcagagaaccgaaaacggaatataaagagtatttggggggatttaaattttttttgaaaagacttacattttgagggaatcacatgaatcccaacatatggctttttcatatttatccatactaccaaaaattacccattttttatctatatatggaaaagaatattaaaatagatttttaggatgctttctttacatttccttatattatgattgctacagctttatggattgttatgatattttttacgatgttctatatttccttatataacgattgctagagcgttaatgtttgttataactgttatcgaaatacttaaaaagacgcacaatatttttttgcgatttagagttctttcattagctgcctcgtaacacgctccataaaacacattttaacaaacctctcgctaaacaattatactgttacacaacgttgtgtgtataaatcttttgatactgtatttttcgtattttgaagttccttatacatttttttaaatatttttgcatagtgtcttttgtctcgttatcctattgttgtttttaatattctctgtcatagtagcaattttccattttctctctttccaacaagtcatcaagatgtcagcttgtaagtttgacatgaatacatgaaaagtttgaaagtagtaggtgacgacttttcattccatttacactcttagtgaagatttcgcaatgctctataaaatcccatttaccaatcttctccctatttcctgtgccacgagtcaatcgctcgtttcctcccttatcatattcgttggtataactcatcgcttgtacttgtaccaaaatccctacggagccttatttggttgatcatttcacattcgtctgtaaaaacaatagaagctagacgcttcccacaaaggagagatttctcgacaactactatgcaacatgaaactttttgttggaagctatggcgactaagtaaaaacaacttgttgaaaaagtgtcgtcttcagtacgcagggtgtaaatgaattagctagtcaacaatatctccacctttactgttctttacaggaggaaaaaaaaataccgtccttcatctttcgaatgtctaaacatgtttcattaaaaaatctcggtctgtaatatcaataaccttgaaaaaccaagctctttgactctcattctcattccctgtttaacgactcgctatgacacgctattcttagaatggcttccccacacttctctccacgtcacttacgtattctttagacgatcaaggctgtagcgctgccaacttaccttccgttagcatattacccattctcctactgatttggtacactaacaagcactgcttttattttccttgcttcaggttataataaatctatcttctgtgataatttcttgtgtttcgctttggcttgctcaactttcgatttacaccctttccttacagtattgtggcttgcaaagtattttcttggctgacgattcattgagaattcattgcaaactgagtttgattgttttaaaagaaacggaatttagtttgttttcgaaatttttttttttttagaagaaacactcttctacttacgtattgaggaaaattccgtcgaatctttcgggtgattccgcaaattaaagtcttattatccgaaatctttttcttctaaagttttctgttcattgatacatacacatctttgttggggttcttaactttccattgtttgtgtgtcttttgatttctttaacttgttcaagaattttttttggctcgtttcataaatattcttacttggttgagatttcttaatcttccgttcaataaaaccattaaatattaaaacgttttcctttttcttataagcttcttttcttgtttcttgtgaaactctcaactaccgaattatctttactgctgtcccctgcttttttcatagttcaacaatggttactcgtcgtcttagtacaaatgtccatatcgacttacagcccattcgtcagggtatcttgcttccttttcacgacagaccggctgagatgagggaccttgctaaatgcaatgatcagttttttcgcaacgttcgggacaccatcagcgaaccaaagtttacacaattgatggaattatggcttgaaaagtctcgtgcggaggttccagacgctgattttctaatgactacccgaaatattatgttatcctttcccagcaatgaggaacagggtcatcagaggtcggcgtcacatggctctacttcatcggcaacatctactccaaaacgtctgagtatctcttctatggaccctgccaggatccatttgtggagacagttttgtaacgttgtaggatacgatatgcctactcctggagaacaaaaagaagcccctccttcgccggctcaagaggcaattccagagtcgcctgttgaagaggctattgcaagtgatagcgatgaagaagaagaagaagaaattaaggcttagaaaattatagcagacttttttcgtttttttttaaatccatcaaatgctttcccgcctcttctttactaggtattttttttattgttttctcaccctgtttaattttttttgggaagccatcctctctagagtaccttcataattgatattttcaggctctcaccgagttggctcaaactcgaaatggaaatctttaaaatcaattgagggaattgtttcctatgttcttcaattgacaggaaaatcttttatgttttgtccttatggtgaaactacactttcttttgtcccgacaacccaataacgattcggcttattacttatggaagagaattctactagagctgaaacccttttttttagttgtgaaactaaattttatgattcatgatacttactccttagccatctgaaatgttctatggctatttttgtaacgattttaattattgtgatgctgaacgtttatgatgacttgcgcgggttatgacttaaataggcctagttttacggcaagtgatctttgtcttggtatatgttatatgattttcttgttcgtgcccttattttcgaaaacaacccgtatgtgagtagccgccaattatgcaagtattattgttggatttgataatgagattccttttgtttggttagttcaagtgaataacagatttctcatattcatattttccattgtagtagtaatgttattaccaatatcagaatgaagcttctcttacagacattgtgtaattatcactcatacgtactatcgatattgatgtacctaattgtgcagttatctttatattgctttctttactcggctcttcagtatgctacaataagatagtttacttttactgtttcatgaaaaagacgctcacactagccgtatgaactttttgtagtacgcaaaaggtgttttatttgttaaacccccttcaacattttaaattcatagctaccttttataagtgccattaatagagatttttctaaaaaaaaaaaacttgacacaggcactccaaaaataaagtgaacatctaaacctgtgcgataacgttagtcatgacggtcataatatgctttcattagcgcgaacgataaatcttccaacttttacaagatacattaaataagtgaggtcttcggaacgttggtaaataaagtatcacacgcctcattattatatagaagtaagcatatacaccgcacatctaattatcgagtagtctagggcttcttctgatgggcataatgaacagcatggatgatgtgctcaacaaccttagggtcagccaaggtactcaagtctccaatctggtcgacttcaccagccaaaatcttacggagaatgcggcgcataattttaccacttctagtttttggaagatcactgaaaattaacttgcgtggagatgcaaaggggccaattgtcgatcgaaccgccatgatcaactccttttcaagttcgactgtagcttcatagccaggtttcaataaaataaaggcattgacggcttgaccggttagctcatcatgaacaccaacaacagcggattctgcgacagcgtcatgagacaacaaagcagcctcgatttcagctgtactcagacgatggccggaaatgttgacaacatcatcaacacgtccacgaatccaaatgtaaccatctttatcgcgggtagcaccatcaccggtgaagtagaacccaggatatggcttcaagtaggtgtcgatgtaacgatcgtgaccgcgccaaacagttctagcagcgctgggccagggactgcggatagcaagaacaccttcaacatcgttgccttcaatgatcttgccagtcaagggatcaatgatgactgcatcgataccgaaaaagggtaacgtagcagaaccaggcttcatgggtgtcacaggtcccaaagaagtaacaatgtgagaacctgtttcagtctgccaataagtatcggcaacagcacatcttttctcaccaactacttcgtagtaccacataaatgactctggagcgatgggttcaccaacactacccaagacacgaagagaagagcgatcgtgcttgacaaattcattaccggcacgttgaagaagacgaatggcagttggtgcaatataccattgagtcagtctgtgacgctcaacgacactccagtaacgagagtaatcagggtaagctggtgtgctttcaaaaacaagagtagcagcaccaagcattaaggggccgtatacaatataggtatgaccagtaatccaaccgacatcaccagcacaacccatacgatccgtgggatgcaaatcgaaaacgtatttgcaagtagcagcagcgccaagaaggtaaccaccagtgcaatgtacgacacccttgggttttcctgtacttccagaagtgtagagaaggaacaagggatgctctggattaacgactgcaggagggcaataccgggggaactttggaataatatcgtgccaccagacatcacgaccttcaaccatactggcggtaggctcagcagagcgttggaagacgagtaccttcttgatggtaggacattcggtaagggctttgttaacgacaccctttaaagggattcgtttaccaccacgatgactttcatcagcggtaatgataactttacactcagaatcattgacacggtctgcaacagactctgcagaaaaaccagcaaaaataacagaatgaatggcacccaaacgaacaatggccaacatggcaatgattgtttcaggaatcataggcatatagatggcaacacgatctcccataccaacgcccatggactggagagcaccggcacattgagaaacggaagccaaaagctcgcgataggtgatatagcgaccctgattgggctcatcagcttcataaatcaaggcaacggcgtctgggcgagcaatggcatgacgatcgactaaattataacaaggggaaatggcaccatcagcgaaccaagcactatctgccttgtcgatggaaccttggacgacagtgctgaattgtttgtcccaagtcatcatgtcgcgagccatgttaccccaaaaagtggatgggtcattaattgactcttcatacatacgtttatactcatccaaactagcaatgttaggtttagggacggtgggatcgccatgaagacgaaccggaggttctataatgagtgtgtgatcgacaggatttttcgtcatcataaaaaaaagtaaatatcaaaattgaggaaatataagaacttgtaaaaacaataaaactgtatggtaaaccttacaatccgtaaataagctttcaaaggtatcactaaaaacgatgaagaacctttagaagagaatgaaaggtaaatataaggggaaagaaaagagcgctagaaaaagaaaataacgagaaaaataaaagtaggagacgagaagttcgtttccttgtactctacgaccaaatgatttcaacgaaagttatgaaacgaaagacagaacacagtttacaactgataaaaagtgatttagtctttaaaatgcgaggtaataatctaaacattagcagacattagtaaggaaggaaaaaagataaagaaataaggtggagggggaaaggaaatctcgtgtttacgaacctcacgtggccatcccaaagcgcagttcaagcataagcagcagagacaaagcaatgagaatttaagaggctcgattttaagaggacgatagagttcaaatacgaattccaccgataagcaacttacgaaaaatacaaaagaaagattcgacaaaaatccaaaatccttcagaaagtttgtgtggttaggtttttgaacagacaactaactcgacggtaagtaggaaatcgcttaacgttcgacgtccgaggagttaactttgcagtttcgaatggggtgtttttttcttcttttttttcgttctacacggtccaaatatcaatacaaaagaagcactgaaagagaacactaatccgggaatccgcagaatccaagtttatccaaaaaagaagggatctcacgatacaagatctgctttttgatgctacgaaaaaacgagcaactatcaaactatgcaagaatacaagtagacctaatggaaaacccaaggagtaggaagcttgacgatatgaggttaagccgcgaaaaggacgaatccgtttattgtagcaatagcaaggagataggatgcgtgggcttgggaaggctggtagacgtgtgagtgatggtggggacacccaacaacaatggactagtgaggaattgttactacgcattaaacgatagccaacgaagtgagttacaatacaccgacaaacgagtcattagcaaaagtgaccatgcgatattggaaaagtaaataaacaccaacacagaaatttttatttgtaaaacaaattacagaattgaatttgaaaaggtcgattaccctggatttgataccaatatcgggtacacttaatagaaaagcaagaattgaatgggttcacaaatagacgagatgtcagtcggccaagtttggtcgtttggttgtgtcgggaaagaatggcaagaagaaaaatgtcgggaaaagattaaaaaacaaaaatacaatgagaagaaaagggccaattgagcgcgcaaatttttttggcacgtggtcaagtttccgacgggcaaaagccaatggaggggatgcgacaaacgggaacacaaaagaaaggaagtcaggaatatgaaagtaggaatggaaaagtggaaacggaggatgcttggcttggattactctatgagaacatgataagaatatgctgcaaacggaatgcatttgaaaatgatatgttgcttataatgaaaactatatagcgtagatggggtatttgtacaaactttacaaaatagacatgatagttaagaatagattatttgtgtggttgaattttttttttttaaatgaactcgtgttttcattctctacggatctaatagcgtatatggtattgtaggacattggctcaataagcgtgataatttagtagacgtcgcaattcctggcaaaaacattgattcaataaagctcctatcattcatttctctaacttttctcgtcttttcactactgtcgttttcttttctatcacctatcgattagaagtggttagaacggccaaagcttgttttcggcgaataaattattgtttgcatgagaatcgcgcaacatttcttagtcaagcatggtcttttacaacataaatatttcgacatatatagcatttcttcccaccgcatgaccgacagctagtgttgactgctcatggtcggctaatgctgactgttcaatctggcagctagatccttaatggcagttcgaaaggcttcttgaatgctaaaatcgacggcgacaaaacctcctgacattctgataaatccctcagtcatcacgttttgcaagaatccctcagagtgtacgatcaagccgtctgcatcttccatgctaccactaccgcctttggtgaatcgaggcttcaaagcgtcgccccatgcctgttttcggtacgacctgactttttctggatacatacggccatcggtcgtgaagccggccaacggttttccttgagcggccatgtacccaagctccactgccgtgcctggatccatgtctggggcacgtcgaaatggatcaaggcagaaaatccctccatcgcaacgatccatcaatttccgatcgagttccgcaatcttcaaactcgtttccgctccaggagccatctcctccacaccttcttggccatcaaacggtgcaactccttgcacccctgcgtccttgcagatttccttgagttcatcaaacagctcaatggcattaggcctaaacacgaggtctcctgccaagtacacacagggcaccttgtgaggttgcgctttagggatactgacctttgccgtaccagtcattttgccaatattcgtagaacgagtatacgaaaaaaaaaaaaaaaaaacaaaaaaaagtatgactattcgaaaaatatcctaagcgtcgttttgtacgtttctagaaatcaacgcttgtaaacacaaagacaagattttaaaagtaacccttgtgtaaaatatcaagaaatacaaagatattacttctcaatatacgaatatatggtagtaaattgtattaaatttcaatgttgataccaaaaacaaggaaaaagattgcaattttcctacgaatgttatctaacaaagggtgtttgttttaaaatgatttcatctctactattcttatactcaaacattctcgttgtctagtttatcaagataaggcatttttcatcggtctgtcatatttttatacaccttccttccctatctatccattccatcagcctttgctcctatctggtaacaataagctcagacaatcttttttatatctgtatttagggaaacatctaaactaccacgaatttcccaatttaccgaaagaaaaaagaaatcgaaaaaatcaggtaatgtaggaaatgctagttggttggtagtgagtgtgtgtgtgtgtgtatcaggtttagagcagcggcttgaagcactaggctgggaaagcgtttcgttttatttatttttactttttttgttcgattctattggatttatctgaaatttgtttttcaatgggaaagtcttttgtgatggattaaaatctttttggagaaaatcacattttgcagaaaaaaatttctagatcccattcattttgttgtggttgtataaaagacgaaacatatgaatgaactatatttactagataaatgggattctcatactttgatcttaccaattattttctactttgtttcattgtcacacagtgtctgtctattactatatgatttaagaaatcgtcgcttaataatgacaacacatagactaaacaaaacgatgttcaggtaagttcctgtttactatttccataatcctatttaattgttttctttaaaatgtcacactaaccttgtattcgcaggattaagtaaagtgcgatcaaatgcttctttgaatttttcaactaccaaaaaatatgcgcagaacaaagtgtacacaccaaaaggtatttactagagtgtaatatccaatggtgtattcccatgtctcatctattcattctctcttgctctgtctacgatttttcatctatcctattgcatcaatatttcacccaatttttcgtactacgctatgcatccccatcaatgcatcttgactggcgatttccgtctctaagaatccattcatatcccaaagaccaatccacacatgcttggaagatgcattgcatgcctacggaaatcattgcatatcagccaattccagttttccaacgattactgcactctaacgatatctattttccttattttcagacacggtatacaaccttaattatgtttaatacggtctgctcgtcatcaccaaatcctgtttttactttaacgaaggttatcgcacgcaaaaaaggtaaacattggattggctcgccatgtcattccgcggagagctcatgaaccaatgaaataagggcgaaaaaataaatttaaaggtcgacttccaccgcatcccaacttactctcaacgtacatcttctcactaacttcgctgtgaatttgtggtttttaaatcttcttctctacaaatactaaactcttaagcctatttcctttccttagcaatttattaattcaaaatgccttacgctcctggagacgaaaagaagggtgcttccctgttcaagactcgttgcgctcaatgtcataccgttgaaaaaggcggcgccaacaaggtcggtcccaatttgcacggtgtatttggccgtaagaccggtcaagctgagggtttctcttacaccgaagccaatcgcgataagggtattacttgggatgaagaaactcttttcgcctacctcgaaaaccccaagaagtatatccccggtactaagatggcctttgctggcttcaagaaaccggctgatcgtaacaacgtcattacgtatttgaagaaggccacctctgagtaaatggggtgatggccgtcaacgacagttgcaagtgttggcgtaatgccgttgggatatgctttatgaattcgtaattcccaatttgcttttgtgtctgtcacgttactgattgattgattgcgtttaccaaaaaaaaataaaacaacatggaaacgagcagcataggaacatgaattgtttgatataaattcttactttggaattggtctccttcttttcatttattccttttctattctctttttctattagacaacctttttcaaaaaaaaaaaaaattccgcaattcctataccgtgaaccagtttttttattcggagttcccaaaagcttatttcctgggcccaccgggttcttccccatcaactcccctctgctttttgaatttttagcttcctgcatattttggtgtatcttggtcaattcatttgagcaagattcagtttcgaattgattttcattgatgcctatgctttctgatgctttgcttttctttacttaaggttttttgagctgattggttttcagtgagtttgggtttgtttgtttttcacctttctctactctatcgtattcccattcacaaccatactcccctctcttttgtggtcgatcaattcccatccagatcgtacacacaaaccaaaattaatcatagctctcttttttagctaattctatgttgtttttacaactatggatcttttatgatattcaagttttcatacctttcacccttttcttttttttttaattagtttcagtatattgcaattgacggctgcagagccctctgagattgctctccggtagttcaatattcaacgcgcatgcataaggttttagtgtaaagaattgaggacagtcaagtgttgtgtatatttgaaaattaattaatctttgtatgtaactagactgtgcgtttaaaagtagcaaggaaacactgcagttattcgcaatgtaaacacttgccaattgaaacttatgtgatatactttactagctcctgtacttgaaacaaaatattagacttagatttaaaaaaagaaaaaaagtatgttctatatgaattatcgactgctataggcaaagtaaatgagatttacactagagatgtcaatgctgcgattttgaaattaaagaaatatcggatatcaaacgaataccataaattcatttagggcgatataattcttctttgttattcgtttttatatgtaagctacgcagtttggtatctgatttaaggatacgtagaactgcggtgagttttccttgtgatctattatattacaatacacaggttgtataagtagcaactgagtataggtattgtattaactgggttataatgttacctatcactaatatagctcataactgaactgaggaacgaggttcagcagtagctctatttatagtattcagataatattgatcttaatagattatcattaagatcaatctccatatcgtatcatacatggtacgatatataattagaacatgtgacatatagtgatactcaacgtagtgtattatagcgtagtgtagtattgctgacattatactgcaggaactatatatcactgtgttgtgctgtatctaataaggttagccgctaatcctctgtaagttgcaaattctcagtttttggcaaaaattattacaaaacgacactgccgcatggactgggaggaagtgaccaaattggaagaaaatgagtacaaacgtggttatgatgaaggaattttaaagggaattgagcaagggtatgaggaagcatttttgtttggactcgagcatgcttataacaaatatttactggcgggtgaaatttatggacgcgtgtgtttttggttgaaagaagaaaattcacaacatcctaaaattaaaaaggcacataggcatttagaacagttgaaatcgttattagagtcgttgcccaccaacaatgaactggaggagaccgatgctgggtttgactcttactggaacaaaattacagccaaagccaaagtggtatcgagtcttttaggaactaagattcttcccgctgaaaaaattgatgctaatgatggctttgagtaatgtcttcagagcaaatatactatggaaggtatttaatattcctgaaaacattcactttacatgattgattatgttatattttagcagattatatctgatatcctggcatttgttctttttcttgacaatatctcccttcgaaagaaagctgcatgtagtgagtgaatagtcgtttttttttttggctaattcattctgaatggaatcaatttcttcatccgttatggttagaaacgttttggaagctaaataaaacattttgtacattaagatggaaattaaaaccgcaagatcttttttcttgtcagccaagtttttccagttaatgagtactagcatctgtctcttttaactctagtaggtgtgtttgactggatggcatccccataatattgctttgttcttatggcaatttgatgatttcattaatgttcgtagaaaataaaagaaaaggatcaaatattaaacatccgctttatgattgccatatgcgttcatgaattagcacattagctgctgctgtgtatatgataatcctatgtatagacatttccccggcataattacttgcttgtccagtttaataagtttgttgtacattagaacaaaagtttatagacacaaaataaagacatcgtaacaagttaaacatcattacaattccccagtttaccatacaattaatgatttaaaaaataaaaataataaatattcatcgactatatagataccaggatagcaataaataaaaaattttgtatgtgaaatgtgcaactttctaaaaatgtattataagccttgattttcgttcactaaagatttcgcgaaacaaagcaaaaataatcgttaccggcatttgccaattttgtaggcctatttttgacttttctaactggtaaattgcagctagataagcttcgataaggccaaggacaatggctatcaaatgttgtttcatcgttttattcatttcagttaacagcaaccgttactacaattcaagtttaagagatatccatactaagaagttgttttttttaaggtagttttaattaaaggaagtcctaacaaaaaacgaaataaaaaacaacgtttatttacgatttaataaaaactggttgttaaatagtttgcgacaccaaaatggaaagcagtattgttatgtgactgtgttttttaggcattgtaactcgctaatttgtttagtgcaatacgttcatgttcattatacgctattgttttcataaataggtatcatctgttttttaatagttttttttttttgcttgtttccttgtttaatattttgctctaatactttaaaattgaaactatcatgtacaaaatacaggcggcctagtttgctttgttactaattatcatattcttgagctttataagaacactcttgaattaagcaaattggataatttaatatacagcgactgcttatattgattttctctttgttttttatattaggacctttctaaattcgataatgaatcacttcttcataccctacattatatttgtgttcatgagtatttgaattcatcttatttacaatattcagaataattaaaataaaaaatataagacaagcctgcccaacatataaagaaaacaatatttgattattatttattcgagcttttgttttagacataatatttataatttacttaaaaatttaataaaatcattgaacttttctcaataaattgacgacattatttaaaaaaaaaaaataaaaaaggtcttgtagtataagaaaaataaaaagatagtaacaataaaaaaataaaataaaattagcgcctcaagtcatttcgacatgattacagctatcccttctttcattttatattttttacttttgatgattggcttttccaaacaataaataccaattttagcaagagcaatacgatggatgttacatggtctgctttgtatatattttcggaatgtatagtagaaaatcatagtttaaagatgatattattgaaagagcacttgaacaattgatgtatgaaacgaaaaagttgagtctatatctatatgcataaaggaaagtaaacaatgcatgaattttgaaatataaagaatcaatcaatcaattgaaatattggaacgttattatcaagatagacgccacaaattcacttaattatccaaagcctttgatctttcttcgaaggtagccttgctagcaggtctggcaagaagtctttgatgccaggaataagttctaggaaactctttttcaaagtcgagctgaggcacttcttcctcgattgaaaactttccttctgcaaaaataatttcaaggaagttattccatgaaatgaatgataagtcagcaattgtgaaccggttggccacgagataatcacggtctttaaggatatcttcgaggactcctagaacacgtttgatttcattcctataacgggtaatggcagatatgactagctcctgatgatagacgctaaaccatccagcctgtccccaaatgatgccttggccagaagcttgaaaaaataaatattgtataactttgtagtattcaggatggtcacgaggcaaagatatcttcctttccgtatcatatttgtcagctaaatagattaaaatggcatcagattcccaaatggtataatcgttattgtggtgatcaatcaaggtaggtactctaccgttagggtttaaggctaagtgttcgggggatttctgctcattttttgaaaaattcacatatctggtttcataggtaaggtccaactccttcagcgcttgaaccaccttccatggattaggaccatgagcatgcgaccataaagtgaattgagccatgatactttattttgagtgtgttctattgttaaatgaaaggagtttggcaatggattaaaatataaagagcatctttaccattttatatacaattcttacttccattgcgtatgcaatatttatgaaaaattttggaaaacacccgaaatcgagttgatcaatttcatccaacttactaatcgatcatacattagactcatacgtggattcaactaaattttactcgattagctgacgacaagccggaagttatgatttatgtcaaaacgtgatcaaagaaagataaatctactaccgattccatttactaatacatttgaatcctgttagccggttacacgctacatttaatcaatcttgtaatgcatcaaaatttcatgtaaaatttctaccaacatatagtgcgtggggactgacttctcgttttgtttaactatgtataatccttgtgggaaataaacgtatgcttagtgttatatttaatttcttaaagggtcggcttaatgcaattccaaattcaaatgcaattaaaactgtttcaggttcttaagacatgtagttttcagaatttacgagtcagttgaatagacatcttatgataaagttaatataaaaataataaaatagtctcaaccatacgctcgagatttattttgttcaccacctgttcaaaaaccaacgtgtcaaacttgcttttagactactgcacatattaattcaaacatgctagggattcacaattggattttcaactgtaaagattagttatgacggagttttgtttctcacatatcaatttaaaattctcttcactctaataatcttatttcgaaatctactttatttttcatcatacagtgagtgtaatatgtttaatttctgtaagcgaattggtaatgattccctatgaaaattttttgtttacatttactaccttgacaatacgatacgtaaattttaaagctattcaacataactgcaaacacgatgagtaattttgcattataatcagaaaaagagcaatggaaaccaaaaagcatacaccaacttgatcagagtaaagcaagtacatgaaccaatacatgtttatatccgttaaatactattttttttctttttaaaagtatataaaaataaccttttttggattattcaataaacgtccagcttttacgtctttcattaattgattgaacttttaaagtcgaaacccgataaatacaatcatgtctaataacgtttattcatcaaaaacttttattcattcaacaagctcaaagctccatgtccttcaattgactattcaatgtgatacattgcagcttttcccatattcttacaacccatcggcttagtttcaacgcatttatccaggatcctagtccgcgaaatcgagatgctttgaagattaaaattaaatttaattttatgcgagactggtttccttattttttgtatagtcgcatgcaagcgaggttcgcataatttggaaaataaaggtagtcaagaagacgttgaattaaggctgcagtttcaaagtactctacaaacgattccttttaaaaaaaaagattcaaaaaaaaaggcaaagggtttaagtaatgcttgttatttcaatttacctccaaacagttactaatgcaattgcaaaaaaaaaaacctacctattgaatcaaaatttctagcccatccatcgctcctcaagataaaggaatcgatattttgagtttaagggagttgctgatagatttcagaattaaaaatttttggaaaaggatgtcgagaacaagaagatacgtctagattgctgatgatgcattctagcagacggaaatacaacgatatgtggacagcacgacttttgatccgttcggatcaaaaggaagagaaatatccatctttcaagaagaatgcaggaaaagcaataaatgcccatttgattcctaaattatccccaaaaatgaacattatgagatcttcttgtgggagacaggaaatttcgcaattccaaacgaaaattcggctcttttttttaccccacagttgcggggtaaatgatgtaacggaccttgggggaaaggatgatgagttagttgggaagcggaaaaaatggaaaacggaagtaagaatagaaaccagtatggctgagtgcaatggcggaaaagattttacagagatgacaagaatctatttatctataaggaaaaactttttccaaatttgtctaaaaacgcattctcctcaattgcctctaggtagatgatataacgaattggaacgagacatcgctaaccggttttctttgtaaatgacattttgtagtgggagtaagtttgaatggagggatagacagatgaatagtatgagatagaagaatagtatatataatgattaagatgaacaaataaaaattgaaagaaaaaagaaattgttggctcatttggttcatacacatgttggttcatacaacttttacccatcgtaagtattataagtaaaaaatagagtacgaaaagctataagtagtgaagcaaaaaaatagaaaaatagaaaaaaaaatatatataaaaaaatataataaaaataaaactcataagagacgtaaaacacaagaattgtctatcatttgttctttaagaagcaccaccattctgtaaaactcttcatttctcattagcaaggacccttttcattccttcctctttagaatccttttcattataacgaattggataatacgcaaataagaacacatcccctaaatacgatatatcgatccattttttactttgcctagcttattgctgtacaattccatttaaatagtttctcctgttaaacagattgagtttcattgttctacttttactttctcttttattggttttgactgacgtcccaaaacctcgattactttcatatctgtcggcatcattctcctcaagaaagatcgtcaatggaggcgacaatataccggaatttaagttgcggacacagagcttgaaaagactgcattttgtattgttttcaagtaaatgaaactgagttttgaagtctcaaaatacatcttatgtattgaacattagaagaacatataagatagatcttgagagctcaattcatcgacattctagccatcatactgcgatcttagacattgtcagcacaaccttagatcgaaaatgaacacgttaccaaacgttgtctaaaacttgccgaatcttatctccgcattacttccgtaatccttagtacatacgctgcaatttcggaaggtcatgatcgactttttgtgtagctataagtgacgcaaatgagaaacatgacaaggtgcgatatttagcaagatattatgcatttgatggagaaaggaaatttcggatgtatatatagtaccgttagctgcgctttttttggtcatccataattttcaaactcactgctttcgatcagatttaccgtttttaaggtctttattgctttgtgatctgtaggttggaacatctatagttcattttctaaaagatcctttcatcgtttcatcggatagtaatcgttcaagaaaaaaaaagaaaaaaagaaaaagaaaaagaaaagaaaaataaaccgctataattcattacctatttgactgaaggttcttcatcttgaattgttttgaatcaaaataaagaaattattattattattttttttcttcgctttttctttatccattcgtcgaaactatttttctgctgataaaagcaatcattcctttttcctgcttctcttgttattcgaattttaaacgactttttttcctcgtccattccctaattctttgcgaccttttctgattctatccttggtttgtactttcgttgtgtaattgttgagaaagtgaactgattatttaattgttgtgaaaaaaattctaaaactattttgtttttcttgatcattcatcctttgctcgcttgcttgaatattacagaaattcgtctccctttcaacggaatatgataatttgttgaatactctaaatcaattaacacctatcaaaagctgaaacattaaatctattctcaccaaaaaaaaagactcaagcttcttcgttgttggccggtctcttttttgttttacgattgttaaattttatactcacaactgccaattctccacttttgactatttattgatagtccctatttaattttctgttcaccgattatcgtcttttttgtaaataatctttcttggaaccaaccaattaatacgttataatcgctaactttgaagatttgctacaatgtttttgaaatatattttagctagtggcatttgcctcgtctctctcttatcatctacaaacgcggctccccgtcacttatatgtaaaacgttatcctgtcatttataatgcttccaacatcactgaagtcagcaattctaccaccgttcctcctcctccattcgtaaatacaacggcccctaatgggacttgtttgggtaactataacgagtatcttccttcaggatattacaatgctaccgatcgtcccaaaattcattttactccttcttccggtttcatgaatgatccaaacggattggtatatactggcggcgtctatcacatgttcttccaatattcaccaaaaactctaacagccggcgaagttcattggggtcacacagtttccaaggatttaatccattgggagaattatcctattgccatctaccccgatgaacatgaaaacggagttttgtccctcccatttagtggcagtgcagtcgtcgatgttcataattcttccggtctcttttccaacgacaccattccggaagagcgcattgttttaatttataccgatcattggactggtgttgctgagcgtcaggctattgcgtataccactgatggtggatatactttcaaaaaatattcaggaaatcccgttcttgacattaattcacttcaattccgcgaccccaaggtaatatgggatttcgatgctaatcgttgggtgatgattgtagctatgtctcaaaattatggaattgccttttattcctcctatgacttgattcactggaccgagttatctgttttctccacttctggttatttggggttgcaatatgaatgccctggaatggctcgtgtgcccgttgaaggcaccgatgaatacaaatgggtactcttcatctccatcaatcctggcgctccattgggaggatccgttgtccaatactttgttggcgattggaatggtacaaacttcgtccccgatgatggccaaactagattcgtagacttgggtaaggacttttacgccagcgctttgtatcactcgtcttccgccaatgccgatgttattggagttggatgggctagcaactggcaatacaccaaccaagctcctactcaagttttccgcagtgctatgacagttgcacgaaaattcactcttcgcgacgttcctcagaaccccatgaccaaccttacttctctcattcaaaccccattgaatgtttctctcttacgagatgaaacactatttaccgcacccgttatcaatagttcaagtagtctttcgggctctccgattactcttccaagcaataccgcattcgagttcaatgtcacactcagtatcaattacacagaaggctgcacaacaggatattgtctggggcgtattatcattgattctgatgatccatacagattacaatccatctccgtggacgttgattttgcagctagcactttagtcattaatcgtgccaaagctcagatgggatggtttaattcacttttcacgccttcttttgccaacgatatttacatttatggaaacgtaactttgtatggtattgttgacaatggattgcttgaactgtatgtcaataatggcgaaaaaacttacactaatgactttttcttccttcaaggagcaacacctggacagatcagcttcgctgctttccaaggcgtttctttcaataatgttaccgttacgccattaaagactatctggaattgctaaatattttgtttcaagttaggaaagtataataacttttgtccctgcatattcaattgtaaagtttagtttatcctttcatcgtaaccacaattgtcacctaaatctctaaaaatctcttcacttatctagttaatgtcgtaacaaaaaagtccagtagcttcgggaaatgatgcttggaatcatacaagtcgacgtgggttttcccttcaacaatgtacagctcttttggctcggaagcgacagcatatgcttcctttgaaaaatacagagtgtcagccttctcaccagctatgtacaacaaaggcctaggagccatttgtttaagaacatccgtggctccataaaagccagccaataactccatgctccacggctggaaaataccggtggatcgaggatgggaaccacgcggtgtacaataatagtcataggcttctttgaataataatggggtggcatcagacaattgctctctttgggggaataaattgaacaagtcatatgactcacccttacaaatttggttcgcgaggcagcggcaccttctaatgcagaagataattgttcggttgtttgcataggttttccatcagcatttctaataccttcacgtatgacgctaccaaaatctgcagcagagacagtagcaaccgatttaatacgtttatccgttgaagctgcgatgggaacatacattcctgaagcacagattcccaccgctccgatacgactcggatctactttgtcttctaggatggacaggtaagtgacagcagctttgacatcctcgatacgttgagatggatcctcaattcctctaggttcaccaccagactcaccttgataagccgcgtcaaacactaaagccataaatccattttcagcaagaaacttagcatgaaaactggccgtttgttctttgacgccaccgcctggataaccgacaaccacagcagcctttgtgctagcaactttactttcagaaactggctaatataggatgccagaaatagggataccccttgaagaaaatgtgactttcgtagacttgattcctgctgacattgtactcgagttggataacgttagattttgaagttgaaaggggaagttagtaatgtaccagtaacgataatgataaattcaaagccattaacacttaacattacacaataaaataataatcgaataaaaccatgctgttcttcaatcaaattcacattgtaatacgatatgaaaatataaatataaaaataaaaataataataataataataatttccacctttacgtggtagtaaaagaaatcatacagaagttttttcgtttctttcagagaatatttttgtttaaataaagctttgttaataaaaaaataaataaatccacaaatatgtattgtttgcaaggtagaaaacagagaatacactaaacaacaatacctacctaagtgtacaatgtttatacacacacttgaattttgattttataaatttaatgttaaaaaaaatatattaaactaatttgcatgataaggaagtctgttcattataaagtgttttcagtacatctctttatttttatggggaaatattttgttctttacactgctaagaaacagtaatcacactctgacttactataaacggtttatgcaaaaatgtgcttatcatcactgaatagttttgtacaaagaggtttcccagtataagtacctttcataatatgtctaatataacttcctcataaacttttaaaagttccaaccatataaacgctgggagacattatttcaaaattaaagaagaacaatttttaattaaaatagaccaattaaaagaaatgttttggaaaggtacattgttttaatttcattacatgcttgaaacccattttccagtccttcaatgttgattgacttggctagataaaaattcattaaggtagacctaagcgaatgtagagatttatggagaaattagatagtgctttcaaatcatatcattaagaacgagtgtaaacctataatatatattatgattcaatttgtgattgcaactcttgaacaaagtaaacaaaagacagtgtttgtcagctctagcgatattccaagctttagtaaagtcgaactgtttatgctttaaaaatccaataattacaaaaggcataccaaattcaattaacaacgtcgcatagtctactagtacaaaatttctctaattattgtttgtgagtttacgctataaagatgtctatctgtttatacattaagttattctacgaaatccaacgtatcgataaaacaaatactttctctcatgggcatatattaattaagaaattaaacacaacttgtgagtttttgcctgctccttcctatgcgctcacaaggaataattctggtagaattcaaaaagtaattaaaccaaaaccatacgttgaaacaacccattcttcttggtatacaaatttcgtaggtgtgtgagtaatttcttcagcactttgcagttttacgatacaataagcacactaccgtaaacgtataaagagacaagaaaatttttcaaataataaaacaccatactaatgatcaattcttcgttgaaacaactttctaagagctcatgaaacaggctgtacctgagccattttccatactaagtatactagacggtccttttacgaggcaacgcatcagtttgttaacattcagtattttccagtcacgtgactactttcggttgtgcccgaaccttgaattttgaatctacccttcgccaacctcaaaattgctggattgtaccagaatatgagcagcgaatcgcgtgaaaatgaggtcaaagctgagacaaaagatgaaattgcgaatgatgggagtcctcagttaaatggtgataataacatacaatcaagtgatggtcataacgacgaaaatgaagagtcgttatcgaggaagcgtgactcttctggtgcgactgtgggcgatttgaaacaagaggaaaaagaatctatgcccaaaaaagaacctgaaccgactgttaaaaagattcgtggcagtggaatgcctccgcctcaacaaaaatattgtttggcaattgtaagacaattaaaaagaaccaaaaattccgcaccatttaaagtcccagtagaccccataaaacaaaacattccagattatccgacaattgtaaaaaaccccatggacttggggacaattgaaaagaaattaacaagttacgagtacagcgttcctcaagaattcattgatgacatgaacctgatgttttcaaattgttttttgtataatggaacggagtcaccagttggatcgatgggtaaagctttgcaagaggtatttgagcggcagttaaaacagttgcccgacgcagaacaacccgcagctgctcccgtgaaaaagtccaaacaaaagtcggcctcaactgctccccctcgtactagaagaaactcatctgttagctctacatcagccagcgttgctgcgtctacagctcctaaagctgcttctccagctgttctcccggaaggtaaacccaggcgccgtaaaaacaactcgcaaatgcgcttttgctcaactgtgttaaaggaattatacaaaagacaatacgagtcgtttgctttccccttttatcagcctgttgatcctgtagcttgcgattgtccggattattttgatgtcatcaaagaacccatggatctcagcactatacaatccaaattgaacaaaaatgagtattctactcttgaggaatttgaaagcgacatccttcttatgtttaacaactgtttcacctataaccctcctggcactcctgttcatgtgatgggccgccaattagagaatgtatttaaggaaaaatgggaagctcgtcccaagtttgatgatgcaaccttggttaaacaacaggaggcggaaacagatgctttattcgataatggtgaggaagaggaggctttgatgtccgaggaagaaatcaatggagccaagtttgctgctgtggataagcagatatctatgctacaggacacattggaggcaatgaaggcaaaaaagatgaaccgtatgaggaaacctcgtcgccgtgatctcaccaaggaatatggtcctattacctatgctatgcaaaatgagcttgccgagcgctgtaattacctcagtgctgaacaactttcaaatgtcgctgaaattttacgtgaagagatgccttggcttcgtgatactgatgaaattgaaattgatgtcggcaatatgaaaccagaagtattccatcgtatataccgctatgtttgcaaacccgacgccgattcctctgaacctgcttcacccgtccttatgccaactaagccagagaagaaaaagggccgcgtactttctgaaacggagcaagctgaaaaaatcagacgtttgcaacaacaattagatcgttttgctggcaaaacgtctcccacttctcccgagtcaaataacgctgctaatgtttccgattctgaaagtgacaatgaaagtgaaagtagtgaatctgcttaattaatacttccttagatgagaggtatcctttggtgcctttttatttttaatgtttaatgtttttgtaacctctcacttcactgtttgtgatttcttctcagtcctgtgatatttttgagacccgattgcatctctaattttacatatttaaaaatttctttaatgcatcattactgtagtagcgcaagctttgggtttttgcatcgcctgagaagttttagatggtgattgaaaacttatgatgtatatacgagcttctcttatttaatggcattcattgtgaggcaatcaatcttgaagacttccttacgactttgaatttttcctttccctaattgctattcactactttcgtatcttcttcaacaacgatacttttgagttttttaaatttgcatatgaaagtcattaatgattttttttttgcttcgggagtttctattattgtggtcctttttttttttggaaggtttctagctgtaatatagccatttataaaccctgtttgagatgtctgtttgtcaagcgagatttttttcatgtcactctttcgtcttttctttttaacacccgataggtcgctgtataatacaaattccctttatacattattagattagtcttgttcttttttgtacatgtgtttaatatggcttaacaaagtgtaatctataatttcttcatttatcaaattattggaatattgctaaagtagcgaagttcgaattgtacgagagtaaaattttgagagtagtgcacagtttgtattcaccaaatttctatcctcaacccaccaccagttggaggtaaaattgcggtagaaaggcaaccatggctgccacaaccggtaatattatcaaatttgaagaaaatgcagattcgaaagatttgctggagcaatgcttgaattgctctgatgttggtgttgtatccaacactgttcgcaatatggatggtactattgcggctgatttagctagaactttaatcccagccatgttgataaatatgcagccatcccttgcgatttggttgcattggattattgttacacatggtggatatttgaccaccgtcatggatttgcaggattcacttgttcagttacatgaaaagcttgtacaaagtgctcatttaatgactaaaattttttctttgtccggaaaattaaatatggttttatctcaggaagagatgaggcaacgtcgacttgatttttcgagtgaagatggagaagaagaggaggaaaacgattacatcgatgaggatgtggatgaagcaggctacgatatagaggtagttgatgaagcagaaaatgatgacatggacaatgatttggaagcaaatgccgatgcgtttgatgaaagcaatttggaagcttctttgtcgccaaatgcagaattatcacctagaaaaagtcacattgatcatgactttgtcatcccggaagatgaaatgctttctgaagaagaggaacaagaggtggaaaaacaaattctacctaaatttgttgtccccgaaagcccaagaaaaactagtcgcaaatctcggtaaaatcgggaatacctctgtaagaaaaaaatcattccttttgcataacttctgttttcttttgatcataataaatagagtgtcttgatcaatttacaaagctctactttttttcctttatattttattggttccttggatattaatatttggtgccatgagaatgacgctttatcgttttatgggtacgtgttggaattcggaaattgtttttacttagttttaatctatacataaataatatggatacaccatacatgtatataaacaaaccaagtttgtaagtatttgtagattgtgtgactaacctgcagtcgtatcgtatatttagcgtgttcattcgaaagtatgcccataatttaatcatgaagccatttgttggtttgctcaacaaatttatagttctacatttcttttcatcttctcgaatatcaaatgttaagacaatttttgatattttgtaatagcgcaatatttttttcattgtatccaatatcaattagtgtagtgctgtatatattaacaaaaaaattgaaataatattaatttattaacataagtaaaacctccataactcttgacaaactactctaaaattttctgccaacaaccaactactttaaaaatgggtttttctgatctcacctctgacgctggtcttaagcaacttaacgacttcttgcttgacaagtctttcattgaagggtaagtcatttttgtgcggaaaatgcatcaaaataatagtgaaataccatttgatcacaaatcgtattttttttcctttgttaaaagttccctatggcatatctacaagtgcaaagactattttttaaagccctctcaattagacacgatagccgtcttttaacaaaaaacgtgaaaatgctttgtttgtatcttttcactgagcttgatgttttttaattaccaaatcctttctaacgttttatagatatgagcctagccaagctgatgctgtagtctttaaggctgttggcgttgctcctgatactgccaagtaccccaacggtgctcgttggtacaagcaaattgccacttatgaccttgccactcttcctggtaccgccaaggaggtttctgcctatggtcctgagggtgctgctgccgctgaagaagatgagatcgatctctttggctctgacgaagaggaggatcctgaagctgagcgcattaaggccgagcgtgttgccgaatacaacaagaagaaggctgctaaacccaaggccgttcacaagtctcttgtcaccttggatgttaagccttgggatgatgaaacccctatggacgaattggagaaggccgttcgtagcattcaaatggacggtcttgtttggggtctttccaaacttgttcccgttggtttcggtgtcaacaagttccaaattaacttggttgttgaggacgacaaggtttccttggaagctcttcaagaggagcttgagggtttcgaagattacgtccaatctaccgatatcgccgctatgtccaagttgtaagttgttttacaactaaagcgttcttccgtttatcagggaggtccttaggaattacaaaaggatcttctcctctatattctaatgttagaggggaatgtgtggatatgggaaagcaaataattaaatttgtttttggtttatatctatcgattgtttcataaagtacgatttttttacctcaatcgtgttgtaagcgtgtaaatctgtataattaagaaatatggggttcgaacggtgtattttatgcaattcaagcaatggtaattgacatagaaatgtatgacaagttattttttttgcatcaatcatgaatactgaaattacgtctctaaagcccagtcgggtatttacgattgatgactgtaatgtatgggcagtaagtgaaacaatctgtttaatttggatgatccaataccatttttttatgctgcggttctttgcaacagtcctgcgtagatcaactcatatttttactatttcgacaattgttttacacttctcaaaattgggtattatttagaaaatactctttacgatgaaatgtatatgaagaaaaataactttgaaaatgtattactaaaatgaataaaacaactagcaacatatagaacataagttaatatgattcagttaacaacgttaagaatacattaaacagtagatgagaaaaagaatttaagtaatttgtctcttgagaatctagtagaatcaccgagattaaactattgaagttaaaagcgacttcttaggaataaacctgagaaaacaaagatgaattttaaaaacgaaacaacgccatgtaataaataagttttctagaccgcaaattaaagagtaattaaatcatttggtattgtttccatgctttgaaacgatgaaaaatctctgaaaacagcagataactgaacccgcagaaagagcttcaaatatttatcgctcttctgagtacaatcattgagtaatggaaagcagaatcgacaagtttcagtaaaagcaacaagtttagtaaaattcggcaagagcattaaggatttgacctgcagttttaaagcaaactttcacagctttctaggatttgatgagcaattgatggctcatcaattacttctttctacgacttggactacgaggttgagaggaatcacgactaacattgcccattacaacgtcgtcttcaaggccaaacactttaggattaaaacctggaataatgcctggctctacagagaacacatgatgtaaaaattcaatgtcaataggaacttcttctcgaatagggtttgtaagccattgttttatagtattatcacgaagaatttcattataacctggcaagtcttggatgtaagccttgtacgaacgacgcatctttctcttgttaccaaattcatcgacacgtccaacctttttagcaagttccgtaagaccataaagctctattaaattctgatgggcagaaggcctcgtcggttggtagtctacactacctacatagtggtattcaggagcttgcgccatgcaaataaattgaccaatgtaacaataagaatatattattgcattcaaattttttaaatatatatgcaatgaatgctttactctctaagttgcttagctggatagtttggagtagtggttggtggtttaaagaagctatagcatacttggctagtataattattgagttacttccaagggtaatcgatttaacataaattgtaattaataaattgcatcaaaacatatattgaaaaattaaaattagtcggtaggtaaaattaaaactttattatgtgtccattcatccaaagtagactgaagtttttcttcttggtacagagcacggaccgaatcagatccaccgatgctatgaccaccaacgaagatgttgggcattgtagatatatcgctaatggaagaaagccagtctcttaactcttgagtatgctcgtagtcggtgacttctacaaccactgctggaggatccaatctaagggtttctgttagaagttttttagctgcagcactataaggacatccaggacgactaaaaatgataacagggttttcaagaaatacttcaaaatctgttgaatccttagcaggtaatttaggagcagatggcactgagacatctgaaagacctaaaggtcctgcctttgcatttttctcaggttcattcagtggactgaatatgaagatatgaataagcaataacgatattataagagatgtaataagaaaaatctttctattagccataatgggatgtaagctttcctttctcttggtaatttgtatgagctgacgaaaagcagctgattaatcaaattattgtgattaaagcaaaataaaataatataaaatgaataaactattacaattaaattccctcacagttggtttagatagttacccaaaacctgtggtatgcaaacggtaggctggtcgcggataggtgaatttaggatattgcgattgaggattgaaaaacttctttaaaggcccaaaaattactaattaagctacaaagatgccaccgttaatatgaatcaagctcagtctattttaatgcttctacaacaagggcacggaaggaaaggaaccttacttgctcgcattaaggatgccaagcactttagtctttcagattattctcaaaagatgtaaatttttttaaataatcgtcaaaaaacgtaaaggtaatgtacaacattctaatgctatttcatcctcatgatttagcaactctcaaaagctaatgaactacttgtacacgtgtatcgtagaattgaaatgcgttttaacaaatccgttaagtctataaaacatggttcgaaatttggtataaaaactacctcaaatgaagcgaccaattatcctaataaaaagaggggagataatgctctaaaaaatatgaaacgtgataaaaaaataaacctaagccaatttgattttaggaagagccaacatgacagagtcaagagccataccataaccagcttggtatcctgtgccagaagcaccgtaatcatgaacaagggggactgaggtgccgggaacaacatcaagctctacgcgggcaccaccctttcgagaaggacggaatccgacacattcttgaataatttcagcaccctccggacccttgccgtggaacaattctggcatcaaagccgatgttctcttaaggatatccaaagtgtcttcagggtgaatttcacgatcccagtttcctggttgcatgaaaccgccgcaaatgactccaccatttaagggacgaggaataatataggtatcagagttcttgccattcaaaatgcgagtttctgttacatgaggagccttaaccaaaacaacatgtccacgagtcggataaacgtccgggtcttcaacgccacccaatttggaagcccagagaccagtgcaattaaatactactgaagcttctggagtttcttcgacagtctctttgatgtgactcaattctttcttttcaaattcgacgccagcttcaatgagcagcttgtacatataattcaagtaatgaggagcgttgattaaaaaggtggtggccttatgtccgtagatacattctcctggaagatctttttcagggataactttgaaatctctgacataggtattccaggatctgattttgtcgtgtttcggctcgtactcccacaattctcgaagatcagcaaaacggattcctgcttcaggacgagttttcgccaagtaggcgaaacgatggtaagtgattttatcccagcgcaaagcattgtcatcagtagcagaaatgctacagaaatttgcgccagcccaaggggaagtgtattctacagaacgatcttcaggcgtatacttggcaatcaccttaatacgaggagcaagacccaagtctgaaagaatccaagcagtggtcaatccaataacgccagcgccaacgatgacaatatctcttggcttattttccttagtcattgtttatattaaaaacgggaaggagagaaatcgagagagcaatggttgagtagaaggagaaagggcaattagactgcgaatttaaaacgcgaagcagggggaaacgagtgcgcaaataatttatatctaaatattagaagcaagttagcagtctgaaccctaattggcaatgtcattaacggattagaggtagagtaaaaaattaaaagcagttacaatgggaaaatacagtgtaacaggcaaatcaagtattagaggattgaagttaaacagtaccatattggattaatatatgcttgcatgcacttttgcatacaatatagaagaatttctaatggatgatattgtattgtaacaactatacatatattaatcactttcagcagttcaattcgctacaatccctgtacaaacaaaagtaccaactaaagcgctttaacgatgcataatccacattggggagttctccggtttttttaccataaacgccgtatcaaagtgccgtgattttctgtaaacaagtataacgaaacctccggttatccgtatagattacttacctaaaaatgattgtaaattagctttcaatttagctcaggaagagtgtgcgaaagaggagtgctgttcgttaggactacccacccttttataagattcagatttgcgactagcggctccaattcttatcttctttacgtaaaactcgcactttgatatccgaaacaatctactgaaccgcaacgcaaatcggtaaaacccatatcgtgttagctacgcagtttgatatctgtttaatgatacaaagcactgcggtgagctttacttgcgatctacaacatagcggtacgcggtatgttaattaaaaacaatattataatcatcgttataagacgtctagtagtatcagtcaccgataataactgaaatgaggcccagtggtagctctatttataacctttctaatatttaataaactaatcttaagtaatattctgacatataaaacagacatcaaaccgcgtagctaacacttatgcatcattaaagaacccaacttatgttcggtatatacgtttactgcgttattagatactcactattgcaatgtgtctttaggttattacgataacaaatcatcgttttaaatcacaatattttattatgctgttcattattttgtaaacattgaaatttgtttgaattgaaccattaaacaaaaggaaaaaatgataattaagcttgattcattaaaaatcaagatgaaggagaaatgaatgcaataaacgaaaatgaaattgtgaatttaacaaggcggaacaacgagttttccgatttcattagttggtttaaagttgtcgtaaacaagttaaaccattattgtttgtgtcttgggttccattaaaaaagacacataattagactcgcatcataataaataagagattcgaatctcaatgcatattatccagattatccaacatcgcgaaccattttaagcgatgcattggtttgacaatttttggtaattgaaagaataagttaagcatacattccataaacttataaagaaagaggataattaaagaatgttagtgcttattttttaaaaagccgcagcttctctgcgttggtgattgtcgtaaagaggttttccaactggagcgacaactacaataataaagcaattagacttcgctttcggcctccgtttcttccaagggaatgttattattattatcgttggcacctctaaacgcatttcctatccgcccaattgcatttcctataccttctaatcgggtaagtaaagaatcattcatacagttggttgaatacacatacctaggaaagaagctataccattcctgataaatttgggcatccttttgagagcacctggacattctgatacgattagaataaattacaggaatattaaacaaacccatttcgtaaaagaaaaaaaaattgcctataacaaagagtgaagtggcttcaatttcgtagcctgtcgcgtcgatatgtttatcaaataaatacatcaaacctttcgttacaataacgacacaactttgtacacccagcacttgaaacaaaccagaaaacatatgcttgagtgtccagaatggaagacgaactgcgtgttagcggtcagcattggtaactccataacttcacataccatataataaaaataaaagtaaagcagctgaaatactgcatgtagaacagatgagagccttgtctaagttcaggttaccgaatttgatgcaaccaaagagtacaaaacaaatgactacccataataaccagattattactacccattttttccttgagttgtacaagccgaccgcagttactttaactgccttggtccaagtttcatagaagtctaatgagttagtgactgaaggtaagaataaccccattgtctcacttacaagtcaagaatattaaagccaaagtgcaaacaagacaccaaaatccaaataatgtccattccgctgcaccataatttttaaagaaagcgtccttatactttagataacaaattgcgagtacattcagtacatagattggtgtgaatgatattagcagttttatcaagaaaggggaagaattatctgtcgacctggaaggattgttttctctatgtgtgttaggagaattgcttacacgtgcgtgatctgtttaaattaatatgattgaaagactttagtaaagaaagaacatgtattaaaatgtgtgcattgcatggccaactgtaaacaatgaccaaagcatgcaatttgactacgatggcaagcttcaatttcaattgagtaattcctttcttattatttacaattcttacccgagtatggaggcagtgcgccctcttcctctgaatcatattctggaagtagccctttttccaaatcgatttcatgtcctgtcttcgattcatctccttcatctataggacttttcaaggaagtgtaattattcttcattttttcaagatcattctttatttaataaaatacatgcgcgaattaattgctataattgcgacaaacgaaacagcgaaatcaagaattttcactctggagcccaatttcagccgttcaacataaaaaacgagcaatttctttcaaagaagacttctctctttaataatagtaggtaaaagttaaaattcgaaaactcattttcaaaatgcaattgcttctgacacatttattttgtcactgccctttttatttaccctaacttagctttccttaaaacgtttttgagaagcaaacgttgtagtataattataatgtcagctacgcagtttggtatctggtttaacgatatatagcactgcggcgagatttctagggatttacaacatagcggtatgcgctttgttaactaataatattatatttattgttataaaaagtctagtagtatcggtcaccgatatagccaataactgaactgaggaatgaggttcagtggtagctctatttatatttttctctagttgctaccaatgtgtaacttgtgtagatagatggacaaacagctacaatcatcaataaactaatgttatgtatattttagcatgacatatagtgctacgcaacgtagtatatcgtagcgtgctggactactgctgacacagtatttgagttgaaacatttctgcaaaggttacataaattagtgtcatttagagcttaggaattcaaattcgatggtgttaatggcttcttgaagcttttttcattcctatatttattcactatatcttccttctcgttgtttatgagcaataagtaaagagccgacttttgctggttcttagattagtgaatatatgaacattagtgtttcaatgctttacgctctatgctaccatggaaaagatcgaacaaaatggattgtcgtgagcgttgcatactaaatcttggctgacagaactgtaggtgcatatgtagtaacggtcgtgcttgcaattgttccattccaacagtattgattaaagcaagaagcacattgacttggagtcgacatgtttttgcgttccaaggaacgttgaacgagagcgcatgcaacgcagacagcaaatgaatcactgttattttgggtagcagcaacagcggcattttcaatcattccactggacaaagtatcttccagttgaacagtgtaggtagtgacatttgcatacatagtccaaggatagttggggaagtaaactacaagaggaggagtatcgtcattaacggtatggtttccggctgtggtgtttctaccgtcgcaaccgaagaaagttggatgagtgttcaaaccaagagccaaaaatgtgttggtatcaggaatatatgggaaaccacgaacgccagaggagttagtggctaaaactctttcatatgtagaaactagggacgatccatctggccatccactcgttgcgctttgataacccccgtcaatcgcaaaaataacatctacgtctctttgtggatgaagcaagggccaaaagggaataccttcactatctgagccaccgtctattaattcaataatgggatacggctccaagggattggtagtggttgtattggaagcatttccataaccttggtaagggttgggataaagacctacatccaattgatcttcggcaagcatttcgaggaaactaaggacagcattgttaaaggtattattactagcggtgagtgatgcatttgtcgcaggaaggataccgctaaaaacatttgaagaggtacccatgaggaaaccagcgttgtcgaaattacgcacacaggattcattaagaggaatgccattaataaggtgtgtacctgtatactccatgggtataaatgattccaccccagtgtcccaagtaccaaattcgatgggtgtaaattcaaagacagtgtcgttcaaagggattacggtttcaccctctatgacattatcagcaatgatgatgggaaagggaaattcaccatcctggaaccacgtttcatttgttacactagagaatgtagtattagcacctccagtcaaaggattgacaagcttaagagccaaagcacggccccaaaggtcagtaatggagacattgaatccagcattcttcttttgcagaacttgctcaaaccactcttggtaaatataaaagttctcaaaagcgtcgtcatagggagcgaagagactgtggtccaggttccaaacgtcgtcgtgcaagaaagtaatattggcaaagttgttaaccgcaacagatcccacaagccaagagccaccagaaagaccagtaaggtacatggaagattgaagaataccaccaagagacgtagtgttaccatttctagcatcaaatgcattaatagcgccggctcccgttaacatggcaggaaatccaccgccagagattgcaattcccaaacgagggccatctgtgtcattcagcacactttttgtatcgatttttaagccggtttttgaaataaagctttccaatgcactgttaacctttgagacacgtttgtcaacaaattcttgttcaccagtactaaggccatcggaggcaggtcgaagcagagagccactagggcaagcaacagtataaggcgcatacgatgggcttgtgctacgcttggaaaggggtatagagtttgctggcttatcaacgttatcgggtttcaataatccgattagttctgggtctgaaacgtctacttcatcgatacgagaaggaaggcccaaggccggcaaaagctggagagcgagaaataatccaaaggaagataatttcatgtttaaaaaaaaataaaataaaaattaaaaaagcaaggttggtttaataaaggataaaaggatagaatacggtcaatgattcgtttttaaaaaaagttcgaatttttcaattttctctgaatccaaaaaaagcaagagagtgattaacaaacagcgagtttctaaagtctgaattttttgaaattttctgagaatgaaaaaaatcaagacaatgaaagtaatcaattaaagagctttcaattgtcaattcccaatctagtaagttcaacgaaaaatatttagatatctagagagtccgtcgagctacaatgtcaataaaagcaaattaagcatttgatggagcggttcggcaagcgatgagcttaaactatatttccatcaggacacctagttttgtcgaaaaggttgggatgagacaggatttcgacatatttccaagaaaataatatcatgttcttttttatgatttaacctatctttttccattgaaataaaaaaatcccaattcaaattttcaagttgggattttgcttacccaccgtccgttttaggaatagacagacgtttttgctcatttccttgccaaacacaaaccggccttgccaactttctaggcatttgtaaattgcttgcttacctacacagatcacactaaagaaggatgaatcactgattgtttgttttaacgggatttaccgattcaatcactaaagttgcaacctttattcatttattcccaagtgctatatatataatatatataggcttttgaggatgaactcacttgtagactcacttttcgcatgacccacgtttctcatgatctgcttaccttgatccgcaattcggcgtggactagaaggaactccgaagatgccatctatgatgttaacgattttctatatgtagcaccgtgagattatgaaatggtggtcatattactaagtctttagatgccagttggagttggattgcctagttatcattagcattcatgggtaccatttatgccctattcaataaatatttcagcgattctataatggaatatttagatcaacctaggctcagctttaaatgacgggatgaatatcaacggctaaatttataaacggataccaacccgattgctgcgaactcacggatgtaaaattgtctggtaatgcaaatcatcgacaagtccatgatgaaacgactttctattttttttttacttctattaacgtcatttaatgtccaactcttctaggaaatccccaaattcgaatattcaataaggtaatggggtgcgatgtttttagttgattcacattggaaatatttcaattcgagatatgaaaaaccattgatagaaacagatagagtagaagttattgcttgatgcaacaaaatttgaagatttgttaatttacagatttgctattctacaaagtctcatccctacaagcagaaatggatctgaatagcgatcgctttagttaggtcataagatcggcagtctaaacgttgaccgcacatggctacattgtagcctttatattctttctttctattccagttataagctgatacagtagatcttgaatttcatcagtttgtcaaaatatctctctcgttttatcatactttacaaacccaaaacacaaacataagaaactgcactgaactaaatgcaaagctataaggtattgtaacaagctcacaatgtgatatataaccatttcgacagagttattaagagatacattattttacactttgtttaagagttcccgtgtatccagactgtatacctcctttgcttagttcccgtgtctaaggagctataacaaagagttttgtaaacctagattatgcactggcttgtacgtcttaaataaatttaaagaactactgaagtgtcatcggtatgtgatgaatccttagcgtagcaaaggcagttgaggtattaaggtcaacgaatactgtattatagtaagtttcgcaatacaagttaagcaacaactcgtccaaaatcacaaataccaacttaaggagtgataaactagatatgcgtaattgtggaaatttgtcgcacagctgaatactccctaagtgtaatatatagttagccaaattaaattaaactaaatggaaaactctgataactacttgtgtttggtgtataaaacttcgaagttgcttatctctttacaatgcctctatagattttttgtttatggtcttatagctgaggctacctttaaagatgtgcgaccaagagcaactttggtaaaaaatttactgaaggatgaagttgtatgagatttcgtatttaaaacaatttatcttcttcattgattaaaattatatgaagcgcttttttttttcaactagaaatccctaaaagaaaatagaaataatattcaaagtgaaactctctatttacgaaatggatacacttagatttttaaaacacattcaaaagtactattgagaggaaatgattgtttttaccagtgtattctttaaatgtgtaggatgataatggagttatcattattgttatgtaaattatttgataatataccggatatcggtaatgaattgaaatcttgcgaatctaaaaaatacaatgagaaatgaattcacatgaaatattcagaagtaaagtacttctaggatcctatcaagcatgtatgaagaatcacatattagccaactaaagattcgcgtataacttcttcactaatcaattaatttcaaatttttatttccccaaaatagccaaaacctattaaattcccaataaacaattataaaaaacccataaattttccttcttttaattatttttaccacttattggccagcaataagggattatcattatctgtttgcactgcacgataggatgtgtgaagaaacttgggtgtcagcgtaggatctttgacccattgttctaacatataggatactgcggattgatctacagacctggtaccgggttcatagtacagtttctcaacttgttgcatccaatctctggctgagacaattctttcgacagaggggaatggaagctgaccgcctccattgatacaaccacctggacatgccatgacttctacatagtcataacgtgaaggctcttctgtaggattttgagcattgcttcttactcgtttttttaataaaacccggccttttcgaaccgaggaatttccatgtacgcggcgtaccaaattttgaatgtttcggaatccatagcacgttgccatagatattaactgttcattcgtttcggggtgtcgtaaagtatactcagtcaaatcgccatttttgttattcattgatacataaggtccaacatcgtcaataccaaaaagcattttagcagcgtatgataaaacatagcccatgtaacctcctgaactagaacctatctgttcttcatatgttattcgaggataccaaaaagggattgcatctgtagactgctgaaacggtatggggtttttagttaactcaattggatcaattcgtaaaaatttaaacatttctaccaattcctttggcgtcaacacagaatctacgtctcgaacaccgttctctgaaaattcatcacgactggcctcaagcttcttgtcaaagcaaggcatgagactcaaatgccaaacatcattacgttgcatactgaattgttgtacggcccaatccttcaaaatacgaccgcacgcctgctgaggtgaacgaacacgagacaaattagggatcaagttagagtgagttttctcaacgtaacatatccaccctggacaagatgaagacaaaatgggaagaacagcattctcgttaatgcccgaatttgatgaagtattagaatgaacccctgaaatttgtgaagttgaatgaggaatgagtggatgttcgtttacgacggaattggtaacctggttttgatttttatgagcacggctttgtaaccaagaattgcaaaactcttgagcgcattgttgcaacacaatttcacgagaagcattagtatctaaaatagcatgaaacccaagttttccaatgaacaccatttctaacactgcctgtatttcctgtaaggagagaccataataagctgcaagattcgccctcacttgtggactaagcgagacatataaaatttcttgagattttcgagattccaaatgctttaaaacttcttggtaggattgaagattaaccagaactgtttctgcagatgtaatacacccactgcaggccaaacaatcgttcagtgaaatactagcaatcccaagttcggaggtctctccagtatccttagttacttcatagtaagcatccccgtctatacgaatgtcattctatcatgttagttggttgaacaaaaaaaatagagatgtgacagatgttatacttgctgctcttccaatgcatcttaccttggattcctgctttttaacttgggcaggctttatgcaaacagctccaggacttaagaagtcattcaagtcatttacagacaactttgccattctgccataaaattacaatgcttgctaaaagtaaaacccagcatttgtcattggcacaagaaattctttattttagtaatattatttgccacactgtggtgcactatcctttttatgagacctgaaaaaaataaatgaagtatggaatagtgaaacatggtttactgccttattcgtttgcattctcagtacccgaaaatcatcaatatatatatatatatgtataaaaaagaagatactttattatagtattgtatttatcaaacagtttgagcttgttatttccgaatgatatattttatttgtagatttaaataagtaaaaaaaaactaaagaaatgagggtaaacaaaacgagatccgtataaagtaaaacaacggttatggtaaattagtatacaaatattttcataatgttcttcacgtgtgaaaacttataaaaaatgcaaatgtccatgaataaacagcgggttcaagttaaggaatgcaacgcactgaaataaatacttaaagaaggataaaaatgccacattggtcaaaagaaaaaatagttaattttttaaagaatgtgcatgggaagttataaaatgaaaggaaagaaacagtatatgaagctgatctggcatttagtatgtaagattcaattcaagagtgccaaacatctaactttcgtagacagctttcaatgttctcacaagtaatgggtttcaacaaaactccatcagattgtaaatcagtcggaatgcaagtctcgtcctcgcaaatgtatacaaacggcacccttgaatttatagtagcactggttcgcactgaatacattaatcgggaagaagatactttatcatttccaaaatgtaagaatacgacgttaaattgctcgttctgcaaaagcttcttaagaatgctccatggatcatctattagaacaagcgttaactttggaaaaatttttttcaagatctccgcaagttcaatttcatccttaggaattatcatttgtaaacggtcaagctgaaataaccctggataagaaatggcatttcgcttatgagttaaactctgagcttgtaagttgtcaatcctgcccttctgaattgtagtatgttcatctgatgaggtaccctctgtaacgtctggtaacgccgtgtgcatgcttgattgcgattgtgatgctgacatagtgcttgaaacacccttatgatcttctaacgctaaattatcaaaaaatgaaagcatccgaccttctttcagagaatcaaaatcatcaattgaatcaattgaatctgtagtaatatcttgcactcttgtcgtggtggatgcctcatagtcagccattgaagctcgacgcgaagacttaacaggacctacactttgagaagttgaaagtttggctttaaacctactcatgtactgactaaaggtgtcatcaacagaagtctttgctgatttaacagccatatgctcctttctaagtttttgaatagtattccggttagctttattaagaaaatccaagtttcgatatgtaaaacttccaaattcaggagtactaatcgtattgcttcgtaaacgacctttacgattaccagacacatgctggggtatagaggatgcaggtctttcttcttccaatttttgtgcttctgtcaccgtaggttgattgtaatattcactgaaatcaaatcctttaagtcccctagaatcaaaatacacagtgtcttcaggagaaaaaggttttggtacaaatggagggtcctcttctaagatagtatcccagttaacagacttgaaaaaaggatgtgcttttatctcctctactccgttggcaccaagcctatttgccggattcatacatagaaggcgatcaatcaaatccaaagcaacactactttcagcagtaaaaacttcggcaggccaattgatgcgcctagcaagaatattttgaaagacttggtcaggcgtttccgcgttaaacggggggtatccaaataaaaactcaaaaacaacgcaacccaaggaccaccaatcactcgctttaataccaggatttccaaggataacttcgggtgctatataatcaggtgtaccaataaatcgcttagagggatctttattttcaaaaaacggttgaactcgaggcgaatctgtgctacggaaaatgttggattcgtctacctgagaagtaggagtatttgttgcagtgggagaatcctcagcgctgttctcgtaattgaaactttgtccagcaagtcgaatactagtaccatctaaagaaagaagcttttcatttaatgaaggccgtttgggacgctctggtgttatcaaagactgtgcttctagtaccgatgaagcagtactaagtgataaatcagatatagcactagagcgatctctcaagtcaagtacaggaattgaagaactctgttttctcctgtgtcttttcatataaccgacccgactcaaaccgaaatctgtgagctttaaatgtccgttctgtgatatgagtaggttttcaggtttgatatcacgatgaattattccacgatcatgaagatcacctagacaaagaacagtttcagctatataagttcgaatccaatccaaatctaatacacccatggttttcagaagtgaaccacagtctccgccgttaagatattccataactaaataaaggtagtcttttgattgaaaggtgtaatacaacttggcaacaaatggtgattcgccttgagacatgagaatagcacgttcagctctaacattgataacttgattctttgctatcatattcgatttttttaatattttaatagcaaaataatcaccagtagttcttttctgagccagatacacagagccaaacgcacctttgctaatcggcttcaatattttgtagtcattgatagaaggatgctcaggggcagagttgggtacaatcgtatgtatacgaggtgatggtgatggtagacgtagtcccacatctccaaggttgctggcccttccacgagaaaacaaagacgaacgaccgttagatgctgggcgattcggaccatcagaagccacaaatcttggactcgaatttggagaaagatactttaaatcatcaaaacgaggatcggagaaattggaatcagatgcttttcttctatgtaacggagaagaataatttgaactatcttgactcataggcgaaccaattgcaaaatctggattactaagagaaacatggctaagatgccttgaataagaagaggatcttgaaagatcattgatatcaaggcttctatcagattgtggtgtatttgtagcgctcccgggtcgagtaatgcattcctctgcctcgagtgcatcgcaggcatcaggaaaggtaattgaaggcgctaatttagattccaagtgtcctaaagaagtagaggaatgatttgttaccaaattcgatacgacatcatcaataatttcttgaacatgatggtcaatttccaaacgaatacgttcagagtaatagattgcatttcgaagacgcaaaactccagtaattttagtatcaactgctgtctttatgtcctcccagagagcaatcactgcggatgagcaattttctaaggacgggttataattatcaagctcgatagtagctttttctgaccgcggagactgaacacgaagagaatccactttatcaaaattcacaatgattttcactggaggaatagtaatgtcgatagccacttccaagtagtacataacctgacttaagaatgaacatagtgataatgtttgtttattctcatcggtaaaaaaataatcatccgcatcaacaataagcggttcatttttgtatacgggaacaagacttgaatctttctgcattccttcctgaatttccagtaaggtactccggaaataaagcaaggaatcctgagcagcctgtacaacagattcataggtgcttgtgctaagacaaaacttggagtgcaactcgaaaaaccatgattgtatttcacgttcacatatttggcaaaactctggggtcggaagtggtaacgcatctaagctgttatgcttgtgataggaagtccttaagtcgcataaatatttgtctaaaagactggcaccgaaaccgatgacatccaataatttagttacaagaggagatacactaccaagggaattggtagctgggttcacaacccacatcgtgtgtgcgggaattgcggacccaggatgacgaatgagaattccaatagcatcaaaaggttttgtaattttttcatcgcttggaagatctcctttagcggtgtaatagttttgattggcatgattagcgttaattgaatgttggaaccgaacatgatagctatgagagtcatccttcaaaagacagttaacggctctcataaacgcattgtatccatcggtaccaaggacttctgctacagaatgcccaatgatcttgtctttgggtatatccaaaagttcggatgagttatcgctaataaattgaaagtttccggaaaagtcaagctcgaatgcaacgggagataaaggaatggaaggttgaaggttctcatcttttgagctgagaagctctgcctgggaatgttgagcttggtcatcttccaagaagacttcttcgcgttcgttttttatatgcttcatatacaactgacggagtctccagcatacagtaaattcaatagagggataggatcattagaagtatgagcagtaagtatgctaattcgacaactttttatataaaacaaataaacgcgctataaataactgagtcactgaaaaaacaaaggaaagaaaaacgaagagtatgaaatacccagctggataattctaaaacaaacaaaaacaattcttttaataatgatagaatttccactcagtatctatacaatcaagctagaaaaaaagaacgatttttagtacttggtggtggttaggagttaagtggcttacaacttagtattagtattgtggttcattagtctggccgcataattcgtcaacaaataaaaaattttttctctgcttcagaacataaagttatgcttgtacagcatgtataatactagataagtattcggggcgaagatttcatagcaatgaaatgaattagggtggagtgctgtaaagtagccaagttgaatcgacaatgtgaagtaaaataaacaatttaagaacaattgttttagctgctggattataaatagacagtatgatgcctatggaatttatagatgtatgggcacaaaaaatgggtaaatacatggggtaaacatcaacatttataaaaaaaaaatggttgcaaaattagcacgcaaacgtttaaagatatcactttgtttgaaagaggatcaattgctatgcagaagcgtgttagattggctgcgctttttttttattatgtctagaaaacacagacttataaataataccatcatcgcttgggaagtacagaaaagtataatagaagaatttcaacttgtgggaatacataagctatttaaaaggaaatattttgcgattgcagctgatctctatatcattgatttttcaatcgagtgaaagcagacggacttgtcttgagtttttaaaaaataaaaataaaaaagcacagtagttacaattaaaaataattattaattggaatatgatatttccgttttttaggaatcgcttgatctcttgtttacaaaagtaaatgatatgttgtttattttttattcagtttgtgttactcttttaaaaagtctaatataacaagatatatgaatttggacttcctattattttacttcttttttttttttttgaaagtttctaaatttttcagagaacagaaatcttaaactatttccttgctcattcagaggtgtaaacaaagaatacggaaagcggtccattctcccgcaaagttatataaaaaaaaatggagcaagcagtatacaaaaaatcacataattaaatttatttattaaggaatgttttctcatcaatgaatgtttccttttgcctacctttttcgatttctgcacctttttaacattttaacataaggagtggtagtgtagaaaccataaacctaattagcgtactttcgcttattttaacttagccttcacatcttatactttttaacgtatactagtcaaaaaatattttaacgagtgtcccttaaatgtcggtatagacctaggtgaaataaatattacatatattatttacgaactggtactcccctcttacagcattccgtgtagcggataattgatatttacgacatggatacagcatctccagaagagatagatgctttaaaaagacactatttgaagaaggaacttttctctcttttgatcgcagacgaattgaacttcgtgagcgaacccaccaatttggatcatctcggtagtccatttgtggaaaaaggaaaatccgtgatcccctatgaaaaatcccaaattcccgttttacgcttcatctttaaaagatttattttaacgtttccgtttttggatcctgatagccaaaaccaactttggaatgtgaacttccgcaatgtacgtaataatggatggaaatgttttaaaagtatgcggattgttactaaccagatattctttgttagctattaaaatctctctcaaaaagcaatgtctctgttctcccggatgattccgatgctacgcatttgcacaaatggttgctcaagttccaaaacatgcttactctactcatgagtcgagcatttcatagtatccaggatgaaaagaacattaacattgaattgctagataccccaaaattggagaaggacttacataaatctgaactccaacaaaaaccaaatattttggaagcttatgttttgggtgtcagacagtcaacgcaggcaaagatgttgcgtacaaagcgagtatatgtaagttctttgcagttctaaaaaaggaaacgaatctaattgttttaataatcacatttttcgattaccgtttttacgaaaatttgcttttgcttcttcataagccgctaacgaatattccaggaatacttgattaaagtgtcttatgaagaaaatacttttttcatagctagaaaatattccgacttttctcatttccatcatttgttgctgaaatcgtatccgaacgcctatgtccctcgtcttcctcccaaagatgaccatgacacatatttgaattcttctgaagactcaacgttgagtcctttaccttcacgttcctctgatacgaacgatccacaatcagattcccaacatgttcttcgtcaggagcgtatgcgaattgaattgaggcaatatataaagaacattctgaatgatgatgaacttcacttaactgaagaagtcttaagctttttaaccgacgatcccgtaactttaactgcatcggagctgactgacattaactttcgccaagagttagatgtcatccgtcaacttgagcaacaaaagtttgttgaaattgcttcccaaagagcaaaagagcttgatgtttatatggaggagtttaaacgttccttgactgaaaatagtatgtaattgtgagacaaggataacaaaaaaataattattgcgtttttatttttttaagtgactaacactttttagatggtttcaccactttattcactgaactgaaagaaaaaaacagtataagtgaactttccccttctttacaaaaaacaattgaatgggctagagtcaatcttgcctctaccatttatgatacgtttatagggaaggaaaaatcgttggagacgtatttacaaatcaagaaaatgcaccagctttttccctatacagttataaaaaatataatgcgattttcaaatcccctctctgttatgaaacgtatcttggatactttattagcacagccttttggcatgaagtctttgtttcaaagattgttgagtatcagtctgaacgagaacgttcgagctattcacaaactcatttctagatatgaggctcgtatcgttagccccgagatcctcacaaaaatacaagaacaagtagaaaatccttgtaaggcagcccgagaggttttggaaaagaaacaaatgaaacgacatgattacctttatttcattttaatctctgatgatgtacctccaaagttgcctgacaaccttattcgccgtgtctacgctgagcgtactgcctggaaagctgcattagatagcgaagattaccctaccgatccgactgtaattagacgatcaaaacgatacggatatatgatgaagcttatgcatctttacgctaagcaattcaacaaaagacgatctatttccctgatatcggaaggagcaacgggcgaaattatgaagagcatggtggtcattttttataaacctttgatgaaagtttaataaagctgccaatgtatatacctcgtaagtatttctttacgcttttttagaatcatgaaggaatcttaatgttagatgatatattaacgcatacagggtcgatgatttttcaagttttgtagatgatacacttaacctcgttgaacatacccaggatagccctgaattaaatccgaatatattggttgaacagtttattgatttggttcgtagacatgaagatagcttttatgattttgttcacagagtataccttcacgatagcggtctttttgcttctttgatggaatggattgaaaatatcattggcttcttgcgtcagggtacttcggcacctatcgatatggatttggttgtcgatgctctagacgaagagagccgacaggctcttgatgttgaattgaataaattgctaaaatggaaccaaaggaaaaagtctgcattgtttcttagaaaaactaccaagtatattccaggtgaagagacttccctgcctgtaacgatggatgagctaggtattgatgaagaaattatggctgaactacgtggtgatgaagatgatcaagacgaaaacgatcaagttacaaaagttgaagaagaacatatggaagatgatgatagtgtggaagagttcgatccaattattgaagaaagacaaagaatgaaacgtaaagcaaaccgtcctgcaaacatcattcctcctaaaccaaagctgagaacggtgaaaactttactacctgcgtttaaggagcaagtataccccattcttcacaaatttgtcagtgagaatgagaaggatatctaacatggctttctaatgcatttatcatactatgttgctttttttttctttataactacatcgctaacgatatacataatatattgtatgtatatatttaaacaaatagatgttaaatatttcgtaagttcaaagttaattaaatttgattttttgtttttatcataaaaaaaaaaagaaataatacagcatgattacgaggaaatataaaatccgttcaaattgtagaaccaagcatgcgaaggtgagaacttgacggtactaacaatttatgtagcgcattcaagcttgggttttcttaatccagtcagcaatatgggcctctaccaatttctcagtatacttgccgatttggtcaacctcaacgtttactaaatcgccgacgtttttcttggccatgattaccttgctttgagtataagagatcatcataatgctaaacgtagaatcatcaacatgagtaatggtcagcgaagtaccgtccagggctatgtaacccttgtaaacaatgtatttgagaacgaaaggatcacgtggacggaaagtaaaatcaatagcttcaccatcctgtttcttttccacaatctcagcaacagtatcaacgtgtccttgaacaaagtgcccacccatgcgagtagaactaagcactgcacgttctaaatttactggatcgccagctttacactgtcccaaatttgtcaaacgcagagactctggagcgatcccaacagtaaagtgatagcggtcgaaatctgtcactgtaaggcaagtaccgttgacggcgatactgtcgccggtatgacaatcgtctaagatctgtggtgcctcgattttcatagcaaatccattgtcaatggtaccctgaacatctttaacaacaccaatggcttcaacaagacctgtaaacatcttatagcggtaataccaagaataaaataagcttagtaccagaaaacagtaagagaattggtaaactggtgaaatgcggtataaaagactttaacaaggaataaccaagcgcacaaagtctaatatcaatactgtttcacaaaaaattggactttgagtgaaatccaattaatataaaatgataatggttgaaggaagaactcactcacggtaattaattgtgccttacgatttctttttgaaaatgacctaagtcaatgacagaaggatatgagttatgaaatgtttgcgaaacgtggtaattatgcttccgaataaaaccgagggttcgtaatgtaaaaagatgaatatcagataatcaattgattaaattactgaagtttaggctagacgacaagtatgctaaaataatttactaagcaattttttaattgttcgcaaaatttgaaacgtctacagtagctggaccataaatctaaggaccagaaagacaattcatttactaagcttagcacaaagatgggcttattatcttttgtgttatttacatcttaatctaatatcgccaaaaggttttgacctaaaaatttccattaacgaagccatactatagattcttattaacagcttggcccttttcacaacaatgtagcaatctcaaaagacggctggctcaaggaagcaagttggttaattgataaataatctcatacttgaatgagtctgctttctcaaaaaaaaaaaaaaaacgcaaatcctttaacctacgtagctggtaaaatgtctacagcgaaaaatagttgaaccaacgcttacgggtaaaacaaaacttcatgaaacaaattaaatatatatattatttcttacttgttcaaataaaacataaaggggctctgaaaaagagcttttcactaccaacccgagaacgtaaatatatccattcctttttttttttttttaaataaagtatatgcgaaaaaagagcattagatagaagtcaaccaaaaagaaatagcaagatattttctctactataagtaatgcgttgtttatgtttgcactcgtacatctaagcatccggtgtcatcggtaactgtgtaatctccaaatcgagaattcataacgcttttggtttaaggtatacaaacgtggtttttatcaaataaaaatgcaatttttgtttatacggaagcaacttctggaaaccagtttttggggatataacgttgaagatgatgactggtccagtttaaaaagggactttcttgtgagaataacacaaatttgaataatctagggaacctcaaataacttgcaaaaacgtatcgaaagccaagcataacattatcccactctgctttaaaatcaaaatacaagtcaaccaatatgctagatgtcttttgcaaaaacggatgtaaagcgacaggagtaacggagaataaaagttgttttatccgtcttaaaactctccttttgaaagaagcaggcttatgctgttcagagtaaatctgtttaaagtcgtcaacaaaattaatggatcgagaaagtctatcaaaagtattaattaacgcaactatctctgatcgtcgaagtcgtaaagagaaggagcggctatcaaagtttgtgacttcatcttcgatattggaaacttcaaacagtatttttaatgccgttccaaatccgttcgtctgtattttcccccacaaacgacagcgttcgcaaccaacacagtccataagtgctgaaactgtcttgaaatgttcacggaaatcctccttcaacgctgttgagatagaagggtcacctgcgaataacatagtttcgtcaaacatttttggagaattgtgaataagcgatactaaacccgcaattttttgtcgtacttcactatcctgcaaaacactatcatgacaaaatgtcaatgaatccaaatgtccatacaacttatcaatagcgcgttgcatcagagcgtaagcaaagtaaagattttctaatctttcagggtagtttaaaactttttcctggaaacattggagatttggaccccatactccatttctttggttcaaataaccgtgacaaagatgagtagatatgctgctatgcattcctgagagcacacgataaaatactctctgctccaaagtccatgcatccatacgttcttttagtagttgctcttgaggctttggaggaggagcaagaggtccttgcataaataacgctggaaagtcgatggtaggtgcagaagagtcaggcaagcattggttgtaaatcatttcccaaattctagtagagtgcgggcctgagtagccagtaaacctttctggattttctaacaaagaaacgtatacacatccgctatcaagttcattatcaacataacaatattgatgagcttcatcatcaagccgttctaaaaggcacgattgtgaaatcttatcaacatgttccatgacagatcgatcagtttcaacaatttgtctagaaagctcgggcatgaatccttcaagcttgcctaacgatttggagctccaaacttctggtacatcttgttcatcagttacgagaacattgcatgcactacttccacacgcaacattatcatcaagattataacggcattccttattaaatagatttagtctataaaacctcatataatcagatttttctgtcaagtcaaatagtagtggagaaactcgagaattcaggttttcgatatcactgtaagaagaattcaatgtatcatgaataattgattttccatcattttttatcgaccaaggagaacctgatttaacgctagaaccagacttacacaaaacttggcatacgtttttgtacaatattaagagaccaacaaggccctttgcaatcttcatctattattattttaaaaatgtcaggaattcttttttaagttttttaatttacacaaaatcaatactccgaacagctctagtagttggtatttggcaggatagatattagtaaacatacccacataaacatgttacttatctttgctacttggaagttataggtctttggacctggaaaagtaatcaaacaaataccaattccattacaatggggttttggggtcgaaactcgtttgaagccgataaaaaggtatgttttattttacagatgggcgaggtgtccaggttggagatgtacggaacggatatgagtaaccagggttgcctttaaagatttataaaaacaatatttacattgcttcatctcacatccatgaagatgtatttgcaaattttttttttttaaatttttgttctgtaattcttttttttgtttattgatgtgttttgtaattgttgggcgttgaattatttacttttcctcgaacaatcaattaaggtagttgggatagaagcaatgacttgtacgtttatcaaaaatactttgcaatctaattttggatatttcttaacatcttgtcactctgtaactcgtttatctcttttgaagtgttggaaatggactaacagtacaagcatatcttggtgaccggtgggtctcagggacttggcaaggcaatagctaaggaactcgtgctacgtggggcaaatgtaacaattgttgcaaggactgtaactaaattgcaagaagcagtggctgagctttcagactcaaaaattcatgaagatcaacaagtatcgtttgagagcgtggatcttacaagttatgagagtgtccatagcatgatagaaagacttccattttgcccggatcatgttgttcattgcgccggatcttgcattcctggtttcttcacggaattggatccctcggtttttgaaaagcaaatgcgacaaaattatttggctagtgtttatgtttgccatgctgcaattagaaggatgaaggaaatatctccttcatattctcgaaggattcttctagttggctccctactcagttctttacctattataggctattcggcatattcccctgtaaaagctgctgtccgaaatttagctgattctcttcgccaagaatgcattttgtatgatattgaagtctctgtttatcttcctagcaccatcctttctccaggatatgaacaagaaaatacactgaaaccggaattggttttacagatggagggtatggattccgtacaaacttgcgaggaagcagcctcccattgcatgacaggtttagatcgaggagattttttgattgcaaatgaatcaactggccatctaatgaaaaaccattgtcgaaactctagcccacatgataatcctattttagaatacttatttgctcttgtttctcttctagcttggccattctatagaagaaagctagacagtttggtttatcaatatgctttagaaaagggttacagacaaccttcgagctctagaaatagttggatatttactttattgctgacatttactcaactcaccattttctatctttccctaaactgtttaattgaaaatccttatagaatgcttagaaatacttttcctatttggtttatcatgcaaacattgcaaatctatattcaaagcccacgcccacccttaaccccaaagagattacttgccggtgcagcatcaatgttgataggctctttactcatctccttcattctcgtagcatttggagcaccacttctgcacgactttcatttgacgtatttttgtgctctaacgctcagcgtctttactgtatatcctcttgcaagcacgcttgcttttaacactgaacaatggcaaaggttccttactttaaaatcctttaatgttataggtagcatgcagctaagaagctggggtcctattattggtgcttggtttggcgcttttcctatcccattagattgggaccgtccttggcaggcttggcccattactatagtaattggtgcattcttaggatatgcttttgcagctatagttggagagattcttcaatagacaattatacagttggttaaattctttatttttagttatcgttaaagagcggagcgttatcgctaattatactttgagaaatagatttgaaatttcttagaaatttaaaaaaatagaatgaacgtcagtattttgttttcctatgagtagtaaatatataataaaatgtaaattaaccaaagtaactaaaactaataaaattaacattaacgcatgaccaatccttaagggacaagattataaacaaatgcttttttttttaaaaaatccgtctattttactttaaaaattttcagcatcttttcttggttttcttctaaattagtgacaaagggcgatgccagattattaacggacaaaggttcaacgtaactgttggtaaggttttttgaaactgttaggttagcaagtaacaaaactcaaaaaagaatcggcttccacatacgatgtcgtaaagaaatttcagttttacagcgaacttgtaaaagtggtatagcttgccatgtggccctttcacctactagaatccaatactggatgtcgcttaatgagggcttggtaaatgcatgctttatgtccgagaaagaaaatgttggagtaagcgtgatatacgcacttggaacataatcgtcaacaaaaaatcgacgtagtcttggaggtagaagacccaaaatatccagttggcggaaacggtaagccatttctaatcctactaagcgtatcatttttaaggagtatcctgaaacacgatgatgatgaagttcatcataaaatgtagggaacaacgaagggcgagactgggtaataacaaaatgattcacgttgaaaatctcagagattcgtgcataaggattagagcgaccggtattaggaagcccagcatacggccaaataaaatttttgggagtacacacctcggtagacccatcgggaagtttagccaaaagaggagaagagcggtaaatggcagcccagctattgctagaacatacggcactccagatcagcacattaggggcagtgaaataattaagaacctgaggggatccagaaacagctgaaggtggagcaacgatgttaacaatacgtccagtacgctcaaaagcctcttgaaaggtaatagtaccgagtctttgacggacaaaagatgctatcatggaaatgtcaagcatattcccatactccacaacttttgaaagagaatagtcagatgtttgctgacatattttccacagttcgctggggaaagtatcaaacaaaccattcaattcttcatcacgatagacactcaaaagcgatgcaatcaacgcacctgatgcgcatcctgcaaggatttgaggaagcaaattacgtttccaaagggtcttagctaccccaaagtgatatagaccaaacgcagtgccgccgttgaaatacaaacaggtagtaccgaaggaaattcgggcagcggaaaaaaaatcgcacttaacgtcgtaggaaagccttttagtgtgatataaaaactctaaacaattgttgacctcacgtacatactcttcaatcaaaatttttgtacccgagtaattctcggtatacagagaggaattgccaatgttgccaaagttacgaagtaagctagagcgcaagaacattaacatgggatagacagatttcctctggcggtatcgttttaaggagaccgtgcatcgatcaatcaatagatagtcgtacttgtccgaggcaggagtaaagcgccatttccaacgccccgacgccttgtcaatcgtcgtagccaaaactttccaatcctcccaagaacgacaatccttgttcataactacctttccctttcgagggccggaaccacgctgctgcgatatcgacgtagcggaaaataaccattcaaaaaatgaaaccaccagtagccaaatggacgaaatattcgcatacataatgcgccagaaattaaatagtgcagtcatattaggcaaacaatggtaaattcacaaattacaatacaatttccaatcttttctaattttacgtaacaagtctcaacaggacctatggatagagttatcctttaatttttgtaagttccaactaaaatccgcttcaaacacttcatgaactactacaatatcttttataattggagaattccacctaacagctcaattcatagaactagctcaattgaagctggttaatggcaattggcacgattacatccgtgggaaaaaacatttgttgaacttgtcggtgaattcggtgaaccctatgtcatgggcagtttataggtgggcatgatgtgtatagcgtattaaattgccgtattatattggtactataacgaaataattgcaatacactataataaagtggagtcgactatcatgacatacggtatttaaatatagcgatacataaaatttttttgcgtatttttactgcctaaaatgaatcggtcaaggatagtcgcaaaagcttttaaattcactggtctattcctttaacaatagtcatcaagtttggatcaatagaaaagaattcaacttttttttttagaaaaacgctaccagaaggacaatctgttttatttttcaggaagaacatttttctttctgtatttattgaatagcgaaggatagggttgaatagtgaaaacaacgaagtattactgtattgcggaatagtcgcatacccacaggttttaggtgagtccattgtgaaagtgattgacaacatagtctagtgaaatactgtatgtaatattacagttgcgtagtgacaaaacgcgacgcgccaaattcacaggtaatttctattgtagtagcccattgttagtaaacaaagaaattcccaaaatggctaataatgggaaaacaagctttttttttaaataaacgggtgttttctttattttaaaagcaggaaaatactgaaataacttaagaaggtatatttcctcttttctttcaaaaataaatgaatcgtggaattgatagcattcatggacccttacgaaaatgaggtttcaaacgaccgcaataagtgattatgagaacagctctaatccttcatttttaaaattttctgcaggagacactatcatagttatagaagtgctcgaggacggttggtgcgacggaatttgctcagaaaaacgaggttggttccccacgtcgtgcattgattcttcaaaaattcaaaattttttttcaagttttcattcatcgaatgagaaagacccaaatgctcaatgttgtgcgccgtttcacgtagaggctcatcttcaagattctgcatggtttgagaaacacggagtgcaagcgataaatagtatcccttcttcagaagagttcttaagaaaaaatcttcaaaatgacattcaccaccttgtaaaagggattctcaccaccgctgccgctgtgtcacaatctataaaaaaggaaggcactcaagtgatcgtttttggaattgaaactgttcgtagtatggttctttcatttcccttgataatcctttctacattagatgaaaattttctctcagaagtcgcgcaagtgttctcctcattaaatttattgccagagttgagccgaatgggttgcacttatggtgaactttgcatcagatttactaagcttttgaagcaattggctaataagtttttgtttttcttcaggcccgatgtttccttcccttcttactttttgggctctttgatagcgcatgaaatacatttcttgccatgggattttaatatgctctgttccaattctgtacaatcagcacatacaaatctccaacctgatattacttcctttgttgcaattttgtcactttcacacgaagcttaccattgcactgagaatgaattttggaatttagaagcacagaagctaactgaaaatacaacccaaaaagtactacagctagttgcggaagatgcactagaagcttggaaactagatattctagaggacatcgatagatgcattcaatgttgtaggcgattcttgtctgcaaatcaaagaataaattattcttcctctgaaaataaccctttttctttcacttctcaagatgttgaagccttgaaggatgaactgtcttctaacttatgtgatttatatttgtggagtatcgacttggagcaaatctcacctagcgattgtttactggacaattattccctttttgttgatttactagtaaccttgaaagtatcccttcttcggatcaagtcaataattgttcaattttcagaaagaattgtgtttctttctctagaatacaaattcctcacaaatatccaaccagaattgaatgatgcggagaagtcccaacttgatggttttgacctcaataaaaccaactggttcgactctaaaggattagtttgttatttaatgaaacagacttcaccagagccattattgatccgaaaccttttgttttcattttggtcatgtaatggtaaaattgaacaagatggaaaaataaaaacagccactttagtgttcattataaattaccttctaaggacagatatagatagtacattttttactactatctttttaaacacatacgctagtatgatcagttcttcagatttattttccatacttggagcacattttcggttcatctgctcattaaattttggaaaaatttcttttatttctcacgaattttaccgagttagtaagaggtttttggatatacttcttatttggttcgaatcgtatcttgttgaagagttggacaattccaagtcaatattctttttgtttaaaatttataaagtttttgaagtctttgtagttccacattttgcatctgctgaagaattattgcattctttatcacacctacttcatcatccctctacaaaaagatcacataaaatgctagagggaaaagagctatcccaagaattagaggatctttctctccataattcccctgatccaattatatataaggatgaattggttttacttctacctcctcgtgaaattgcaaagcagttatgtatcttagagtttcaatcattttcacacatatcaaggattcagttcctaactaaaatctgggacaatcttaacagattctcacccaaagaaaaaacttcgaccttttatttgtcgaatcatctggttaactttgtgaccgaaaccatcgtgcaagaagaagaacctcgcagacgtaccaatgtgctagcatattttattcaggtctgtgattatttgagagagcttaacaattttgctagtttattttccatcatttctgcgttaaattcctcacccattcatcggctgcgtaagacatgggcaaatttgaatagtaaaacattggctagttttgagcttctaaacaatttgacagaggcaaggaaaaatttcagtaattatagagattgtctggagaactgtgtcttgccatgtgtccctttcttaggtgtttacttcactgatctgactttccttaaaactggaaataaagataactttcaaaacatgatcaatttcgataagcgcaccaaagtcactagaattttgaatgagataaaaaagtttcaatctgttgggtacatgtttaatcccatcaacgaagttcaagagcttcttaatgaagttatatcgagagagcgaaacacgaataacatctatcaaagaagtttaactgtagaaccacgtgaatctgaagatcaagccttacaacgcttgctaattgattctggcattttttgaagcgtgaacgttaacagtgatttaagtttttatgagcttgcttcgaattcctttaatattttcaaatcttttgtagaacaatataatcttaaaatcatttaattctgatatagtctgcctcgtaaattatctttcgtccgtttacctcacaccttaatattcataagaagaatggactggaaagaagcgattccaggtgccgccaaggtagccattgaaaccaaagattatattacctactcaacgctactcgaattgatattggaagaagcgcgaataaaggatattgatgagcagcgagagttgattaagtgtctacatgaagaattgaagcaagaaaagaatgtaagtaaaaatattcatgtaattaaatatgaattctcctaataatgttgcaattaggaccatataacacgcgaaatttcctgggacattataggaatggtgcttccatatgttgggaaagtacaaaatgaggccgatgagtttgtggacttcttagccaaaaacggaaatccaagagaggtgttccttaaatgttgtgaacttttgataaatggaggctttgaaagtccccaacaattcatatctctgaacagtgccattttatcagccttacaccgtatatctacaaagcgaccagttctatttgtaaataattttttaatttcattgttttcggggttagcaaatattttgcaaattgatagcgatgaactgtattgtgtttggaaaatctcaatatcatctatacaagatgcaatgcatcgctttccagtgtcagagtgttatttggcatgtttaaaggcttgcagtattttagctcaactctttttaagtaaagaaacattgatgctttctttccgttcgctgcttcaaacaaaagatcagtatgcagagtttcgtgaagaactaagtggcgctacgactaattgtgacaagttggataccctttcaaaatccataataaacatcttcgattatcttttgtcccatcttccagagagctggagtatcattactgagcacatggctcaggagctgacaaaagctacatatgtaagtcagtcatcctctatttcctcagaagacgaagaaatagccaaaaatgctgatgttcctgctgaagttgataacaattctactaaggctgatgataagcgggatgaaattgaatttgacacgaaaggatgtcttgctttattaacaattaaatcgttctatcaaagcggaaacttctttctggattttttgaaagaaaaatttccctctactatccttgaaactttgcagcaattggtctcttgggagattcaattggatagtgttggtttcaaagatattgctgtgtatcaaggatatttgttggatttacctcatttccaggttcccgactccgaactcgagcatctctccagtttgctccatggatatcattttatggcttcttcgacagaacttccttggctgcgtgttacatgcaatgctatagtcacaaaatgtctggattctcagttaccaagtgtccgtctttcctacatacttgatactttggaagaatgcccactgttaaatataaaaactgctatcctaaattattatcaaaaacagtgttctcttgtaaaagatagtaatgaggaaggtttaaaaaactttgtatctcccaatacccttctggatgttttcaaagtgtttgacgctatggaagatgttgaacttgattctcaatccctatcgtacattcaccaaacactggtgtttctctattcactcgagattcaaaatttgttaagtcaaaaccaatttcctactgtatatttcactaagatttccgaccaaataaataattatgagggagagcttcctacagacggactgaagtattatattgagcttctaaattctcgcaacaaatgaggttcaacaacaaaaattaaagttttcgtgaaaaagtgtatggaaggaagcataaatgtttcttctacttctcccctaacatatgctctaatcgttttacttgaaattgtattttttaacattttacatatatttttgattcaaattcagatgctaaaccaattagtaaatctactgctctattaaattggtcacaccaaacatacatttcattcaatagcatcagggatcaaagaaaggttatactggatttctcactgcaatcattgctatattcgttacagccttgctgtaaaaaaggtagttccatatttagaaaaaagatcgacatttcataaattcaacaactcatgactgattttcatttattctaaaaaaataggattttaatattagctacaattaaatctagagtaaaaatctaatagatatatataatttgatgtttttctagtctgttattattctgctagtaaacgctaatcagtaggtttttaagtacgaatagcgacttaaccagagcaaactcgaaagttgggttcttcggtaaaaaaggagggattccgtctgacaagtaagtcctgtgaaagaaccatcaagaattgagttttttataccactttgcgaagcaattttaaaaattgatcagtttcatgtctggagaaaggcaaaactgccaggttccttcataaaatagacgtttttcctttcctctttcactaagaattaattcacattcttttatcaaatacaatggagcctggaatacctccaatgattgataaagctccagcttatagtcatgttttgattgctggaggtatcggaggagccacggctgatttcttgatgcattctttggataccgtgaaaacaagacaacaagcggctctatatacgaacaaatataacggaatggtaaaatgctactccacaattttgtgtgaagaaggtgtttttcatggcctttacagtggagtatgccccatgcttattggcagtttgccggctactgctttgttttttagctcttatgaatatacaaaacgacatttgatgagtaattataaccttcctgaaaccctttgttttttattagccggatttgtcggcgatttgtttgcttcagttgtttatgtcccatccgaggtaagtattgcatatagtgggaagaccaaatatttctgaaaataaatttccagtttttatccttctaaaggtttcccgctgctttatgaaaaacagttgtatactaacgagcgtttttcataggttttgaaaactagactacaattgcaaggacgctacaataatccccatttccagtcaaattacaattatccttcatttcgaggtgccgtcaaacagattgcaaaacaagagggaatgaaaacctttttttatggttatcgtgcgactattttgcgagatattccattctctggatttcaacttttattttacgaaaagcttcgtcaagttgctcaaaaagaatgtggtcaaaaagatataggtgtgtttcgtgagctcatcaccggttctttggctggtgctggcgccggctttttaacaacacccttagacgttgcaaagactaggcttcaaactatgataagaacaacagataaagtatccgatgacattaacagcgggcgttacttttttgccaaggacgagaattccaaatccaaatctgctgcatctcttgtaaaacccaaaatcggtattcgtcatgttttgggaggattgtataaatccgaaggtttactgggtttgtttcgtggatttggtccacgtatattttggacctcttctcaaagctcattaatgtttgtcttttacgagggtattatccgtttgttcaataaaaataatgttttagagcgggactaaattcctacttttttgaattttttgtttaacaccttttggcttctctactttttatgttttttgtttcgttttcagcacaaaaatttatcacccctctcttgtccatctagacttcaacataaagcagccttaagagtatatagtttttacttgatttataaaaagcatactcttaacactctcttctcctattttaaaacaagttacgactgaatcggtattaatcaatctctcaattgaaaaccgaaccggaattaacttactaacgactagtatgtctatgtatacgtggttagtcttgcgattattttaatttcaagctcattgtctgttacatccatacatctccaactaaaaatggcactttatcacataggttgaattcactgcccttgttttaaagccatctgatactttattgatccattatagatgattttttttgcttttttgtttacatttagctacttttgaatactatttatatcacaaagcagagttaaatacacttcaaataaaaagtgtaaggatcattacttgttagttctagtaccgaaacggcaaagtaagcttttgctatactgagaagtttaagttttccgtcttgttcaggctaattgcttgcggcttacatatagcagattccaaataatgagtgactagataaacttttctgtttatgctcactactacaaaggcttaaagttgaaaagaattcgcatattaacataaaagctaaataaattagaattgctagcctaaaatttgaactaattaatcaaatagtatacagatgaagtaaacctaatttaccatatgttgaacacgcaaataaaaatgcttcttccacttgacacatatgaccatgtaacacatagcctgtacacgttgaacacagtgaacaaaaaaggtttgatcaaatactaaacttccacgatagccacccgtcatcaaagttgtttttgtccctttgttaatccgcaatggaattggcaacagatgcaacccgaatcaaggataaaacaagattttatcttgctagatagactatgctaacccatctataaaagtccaatacattacaaattggacttgattattaaaaaacaatcaaacggaagccaagcattaaaagaagctaagttgttgttgaagttcaaccaacaaaaattaaaacaagtgcagcaaataaacaacacataaatcgaactaatgcaaatcgcatgctcgaatccacaagaaactataaagaagccacactcaagagagagtataactttgttaaaattaattttaatcatcagaaggcattaattttgattttttaggagtgccggcactggcaagttcatctgacagctcaatattttctgtatctgtggtaaccgacaatcgccgttttgaagaattgatggtaccttcagattcgggaaatgcagattcatagccccgttctaatacatcttcactggtggcctcccaatctacattttcaccatcattggtaattggttcctggctcaagtcagcattatttaaacttccatcaatattataattgtccaatttcacgttctcatcttcaacatcttccaagttctcatctttaaagattcctcaaggtcgttatcccgcaatttttcggttgcctcattcggagattgatcattttcgtcaagagttattatctcggaaccatcttctgcaacaacagagtttggttcctcgttatttaaatcatttctcttttcaagaattttagagtcaatagtctcagcatcttcaacttcatcaatctcactattacttgaactggataccgcttgcacaagttcattatatctagcaataaaccgtggttgcgtcgagaatacaatagaaaaggactcttctaaatcacagtgaacagtgagaatctccaaaatatcaactaaatgaatttgactagcatatacattgtcttcgttgattttcagcgaaagatctggaaactcgcacaaaagttcagaatcagaatcaagaagattcaaagactctaagcgtgctctaactaatccaaaaaaatcttcaatggtattttcgtttaaatcgtcaccattagaatataaatacataccctcatcgttgttattaccataaaaagcacattccgaagagtttggaaaaatgacgatacccttggaaagccaattaaaatctcgggtttcggcttcacttgtggaatctttgggatcatcagaaatgggaagaatgttgttaacactttgagcgttcaattctgacgaaggtgaaacgacatcatctacatccacaacttcatttgccaattcatttagctcagtgggtacttcgtctaaatcattttccccatgcgtcgtacctttagcttcaagatctacagcatccgttgcttcttcagtcacaatagtttcttcaaaaccttctttttgatgtaaatcgagagtttcaattagtatttttgaagccgcttgatctagctcttctctaatagtctcagttttattgacagagtttttgggttcaaagttaaaatttttattatcgatgtcatacgtatgttcattattcttggcattctcgacatcactttcagataaaagatctggcgatccgtttatggcttcaacaacttcctcaactttaccatcatgcaacatttgattgaacgcttcgtccaaatccacttgaaccttttgggctggttccatacctagttcgataaaatcacctgaatttgtcgtataagggtgattgaccacaggactcactccggccattaaaaattaaatctaatgctacaaatttcgaaactaattaagaagtacttacaaaattacctgaatttaaaaaaattgtgctacgtaggagatgttggctaaggttaagtttgcagctaagcggtattcatagtaagtacaataaggaaaaactgcgctaagcgtaattcaaaattgggcatttaattgctaacgtggtgttactccttaagtagtgcgcagcaaatattatcatatcgagatgttttgctagttgttttaggatatgaatagaataacttttttttccttcaatttgtttttctttttagaataatcagcagtcagcttaacgaaatttggttaaaaaagtccttgtgagatgaattatgcctaaaatgtgtccctaccaaaatatattatcttacaaagaattatgtaaggatttatgatgacatttattggtattaactatacaatacagcaaaatacacattaataacatttttaacatgatatttaaaaacacttagataacaaaaactagtccattattccagacaaatggggccgtaaaaaaattcgacaccagcaggatttgaacctgcgcgcggagaccgcaacagatttctagtctgtccctttaaccactcaggcatagtgtctaagttgcttaagttcaaaaaaaataccaatataagtgtatagtcaaaaagtaaagttacatagatttaagtgagtataaaaggtataaatttaaaactagtttgttaaataaacacgaaaaatgaacctcggaacataatacaaaaattgagatttactcatttgttctaccttcaaggttatggtgcacgtaaaaagaaggaagtcaattttacttcctttatgtaggctgttattgttttgcagcccgtattctaaccaaacagcaattagctaaaaaatgtaagaagataaaccggcgatttgattccgctgaaatttaggtaaatcaactaaataatgtaaatgtacagacggatacaacgaatatgtgatcaaaaagatttcatttctttaaaacgtatattagctaaaagaaagatagataagagggggggagttgcttaagttcataaagataggaaaaatgcaaaaacacaaaaagaaatatcgttgcaagtaaaaaaggatgagtacaagttaatctccctttattttcttaaccgcgttttcataatgcttttggactccctcaactgcagaagtcatggacttctgggcattttgtatattcttttgagtttgttccaaaaccaacattcgttgctttcgaatagctggaaatcgtttctcaacaaacgcaccaatatttttagaagttttgggaaagcaaaacataaaggtggccgcagtcgataaactagtaattaaccatctcgcaggtgcaattcgatttctagcgaagatattgccagccataccaccaaccactacataagctacaccgggaagctttcgttcatcagaagaaaacacttcatttttagctgttgaaattgtttttctttcggttgatagaaaccatccaaacgcattctccgtttttaaacccacatagcccaacgcgtgaaaaatggaagaacggccttcatgtattcgatcagccaaccaaggaaaattgcttttcaattccggattgttgttcacctcctctgtttcataataatatgacatttttattactgccgtttgtagctggtaagtcagaagcccgctgaggattgcatagtatcattctctttaacgatgtattgaaatgcgttaaataaaatgttcaggttatagatttggatagtcttcaaaacgacaaatgcttataataataagtagaatgtactattttacttgcatatgtattatttttgatatcgaaaaattgtctgaccgcggtcattccatctcttgcttagctacgataaacaatttccgtctctaattcatcaccttttattccttgagttaaacaagcccatattttaaaatgaaaagaaagtcaaatattttctgggttcttattgttcacaatctcctaagcataagtgttaggttccacacatgctttgcatttttgcaaataaagttaaggctataataactagtgcaagccaacagttattttctattgatttatcaaactaaaagcatttgactcggcatactaacttaacattaaaaacattaaagaacccagcacaaaaatggtatataacatgaactcttatacaatatgtaatattatcttagcaaaaatttatatcggtagtagcatgaaaacattcccatcaagatattcaatgaaaagtagacttgctaaattgaggatcctgttttttacataataggttttacacggtcaatccttttcaaccctcaaaatactttccccagaaaattgtatattgctttccaaaaaacgctagtaaaacaacttgaaaacatcttttgaagtttcattaacaaacaatatttaatgattatgccaatatttaataaagcttttttattcaatgtatcctactcccacatttaacgcaataaaatataacgtaatatcttactttgcggtgattcaaaatacagtactgcaaaagcctcgatattcatatctgcttacacagtcaacagtcttcttgaacgattgatcctttaccaagcaccacttagcaaataacggctttttccgttctttttagtgaattcatatgactgataaatacgcgttctcccttactacattttcacctaacggtaaactcgttcaaatcgagtatgctttgaatgcagtcaatgctggtgttacgtctgttggaattaaaggtactacataatcatgggttctaaaataatataacctgtgtattccctttggaagcgttttttgtttttgtgttataaatactaacataattatagctaccgacggtgtagttttggcgacagaaaaaaaacccactagtgagttagcgatcggtgcttcattggaaaaagtttgtgctattactccagacattggcatggtatgtctacatataggtttcagtgaagtcaaaaattggaatttcggattctaacggttttatgtacaggtttatagtggtatgggccccgattttcgagtgctcgtggataaatcgcggaaagtcgcacaaaccacatataaaaaaatatataacgagtatccccctactaaaatactcgtccaggaaattgcttcagttatgcaagagtctacacaatctgggtatgctttttatcattaaatcgattttatttaaactatattatgttagatgcaacattgtttaagtaaatttgtttctctcatcttcattattctgttttttttttactctactttaagctaacttcattatttagtggtgttcgtccgtttggtgttagtctcttggttgcaggaatggatgaaaaaggtccttctctctatcaagttgatccttcgggcacctattttgcttggaaagccacagctatcggcaaatcatctacagctgctaaaacatttttagaaaagcgttacaatgatgaacttgagttggatgatgccgtgcatacagctattttagctttaaaagaaacttttgagggtgaattaactgaagataacatcgagatcgcagtagtctctacgaaacctacggatagtggaatcgttggcgtaccaggcggacatttttgtcgattgtcccagtcggagattcgtgattatctcgaccaagtataaagttgaaagtgttaggtttattttttctttatatttcctatacaaaaaaagcactagcaatgttttgttgcaaaagttgctttttaagtccattttcactttcttattcagtaacaacttacatgaaaaagacacgagttcgtccaccctttgtccatgagattccaaggtattagttgtttttttaaacttacgtatggtattacacagcctgaaattagaaagactcatactagtgatagctgctatattctatgacatgaattagatttacgattcccaaacaatacggttcctttattctgtatagtacaaatcactccaaatgtttaacaacaagacagcattcattagaagaaactataaacatagacaataaataggggaatttgaaaatataagtagtaaagaatccattactccttttggactttactacctgattgcttccgcctctccgcagcggccagcagtaagtctcgtctgtggttcttttgatcttcatcgtcattatcctgttgaggagtataactagctcggtcactaacataactaccaggtttgccaagcaaatctgctgcatctgcttcctttgttagttgacgaaacagctcccaaaaggaggagtcgtgttctccatgaacattatgcgtcaattcgtgaattaatgtacttttcacagttttgtaatctcgaaaaccatcgtaacggtctgtacgtaaacgtaattcaatatgtgcaccttgattatgattgagtcccagagttttagagtcatgtcgagtatgttcagcagggtccatttcactaagtaacgggacagtccagcgatgagaatccataatttttttaatgcctgtatcgtctcgcagcctttctaaatatctcaaggcacgatccttgtgaggataatctaaaaccacaagttcattaaatgtgtatatacttgcaggctttggtgtagtatgaggcttcttcggtttcaagctgtatgtattcgtgctataatcagggaccttcaattgagaaatggcttgattgacaatgtctttatcttgtctaattagacacataatcttcgattcgtttttgactacatcttgtaaatgtgagtcatctgaaagattccctttgtagagcagcttaatcaaacttggagacacatctatttcttggccaagtttctctttagcatccagcacagtatcattctcattaaatgaaagagcaattacatttcctctgcaactaaatttcaactccatgtgaatttggtaattagcaaaatttctaaatctgtttgacccaattaaacaattgagctgaatataaaaaaaaaacaaagatattatcagtaaaaactgaagaaaagagagtagtgtaatttttgcttattaattggtagtggttaagtcaatagacaatagtactaatatatatatacatacattacgatttagactgtgtaaggtagatgtggcctgaatataaccgaaatgaataacttgatggtggccaattttgctggtctgactaagaacagccagctttttgttctatgaaattccagcaatgctagagtccattgtagttttctggaagtgagttgtagaaaagcgcgacaaagtcaagaactatagtggtgttttagacttagcaatttaatttaaaaaaggtaccagccatgtttagtaggaccatagtttcaaacttgaatgtggattaacgattttcaaaagtatgacttgaaaagataaattggaattatttagaaaatttctgtttcttgtacggtagactttttataatggatacgatggatgaacgtaagtaagtcacatgaattttagattttgaagacaactataagcagcgataaaaagtgtactcaaagttaattcatacttcaattaagcaggtttaagatatttgacggtcataataaaatcactaaatccaaagtaataatagtttatggatttacacatgccatgttcagcaaatttgttcatatttgattcaaacacatgagatccagcaagatttcacgctcttcattttatgtcatcagtttcgattagttttaaactgttaaatagaacttttcacgaatgcaatgaatatatacatgaatcgtttaataacatataacaaagatcaatacaaggggtttaaagaaaaagtatgttttcaattaaaagaatcagcacaaattttagcataatatactattgattgaatgatttcaaaagaacggatttggtattcatgtccgctacagtagtcatcgataaaaaagaaaggcaaaactagataggggccgggaaggttccgttttccctttgttcgtcccagcgttctacccattctgtcgaaacattgttagcatatttgcagtttaacaagcgaaaccgcttaaccttccaaaaaaaagcacttacccattgggcacaaagattgataagcgtgccaaaactgtttacaggggacaaagtcttcacccttagccttaatacagcggaaataatcaatgtaactttggaagcaatctatcgtagcaatgtgttaaaaagagtcctcattataacaaaaattgacaacatataaacgtcttttcaataaaaaacaacttacgttttgtttgattagtgtttgggaatctatatagtaaataagatattgtaagtaacttgtttaatgataatatcaccaatgtcatattaccttgcatcaaacccaactatgtcaacgttagcatttgcttcctataatatagagctcttacctgtaccaaaagtaaactgcttaggtgcttcttgatcttcttgttcagacatgttgttttgctgctaaattgctttttcggagaggcgattggtagaggatacgttcgtagagccgcttgtgagtagaaaggaatgggtctaataacgataattaccaaagtcattgaaacagttaaacagaagttaatgagcatatgctgcatttataactatcacatacttgattgtttttctattttactgccttaaatatgcggtagatgattcagtttttagattccccgagcccttgtcgctttgaaagtagtatgcctagtgatttgttttttgtacaatatttaacaactttcagcaaaaacatgatcttccgttgcttgcaatctaagtgaagctcaattccccgaatcgggattttgtacgacaatatcttaacttgaaatcatgaggaatcaacactgtagaagtaaaataactgtttaataacagtgcgatcttacctttatcctatactatttttcctattttctttttgcatctgcgtttattgagtgaagtgaaagaggtatttattctacttaataacatgaatttgaactgacagagatccaatatataacaaacaagattcctatactcgtttaaaaaggatttgaataaactgtttttaggatactgttctatttacttatttattttcaggcaaaaaaatagtgccgcgtgaaagaccctcttttgcttttcccgattgaatacattatacaattaaaatccttttttgctaaaagattgaatttaaccagcgattgattgtttttatacgttcgagagtttcatctccgtttttattaacttgcaagatcattcacaagacgaaaaatccttgatcgaataacattactttttgcttattaagttgaactgttcagatttatagatgactagccttgactgttcaattgcacttaaacaagcaatcactttaattcacttcgatcgtttcggtataagacgcacttcaaatcctaagggtagtcgactctattaaatttataaatttgttagcataaatataacattattctgaattgccctaatagcgagtcatgtattctcttataccaattccaacgcctaaatcctcttagttctctttcgttataatcgttgttcctcttttcaatttctgaatattataagcgcatgattcacgaaatttcatagattttgtagaggacttttacacagtgtcttctcctctattcaggtctgcaactttctagctaacatacacacccttttcatctaaacgaatgccttttatttttaacatttttaaatcaaaccaaggagactagataaataaaataaaaaaaaaagaaatcaagatcttaactagattgcagtttatgttcgacgaaactttggccattttaagaatttgcctaagagcttaggaaaaaaataaatcttatcctaaaacaaaatacttttatcggtttgtccgcagttaaatataacttcctaattcctatttccagtcttttatttacatttaaccatataacgttttccaacgcatccgttatatttttcatctaatttagatgaattttccaactttcacaagttgtcttcttccagcagctttacgttgttgaattaattggttcttttgttttctttcttcgcttacagaaaaatttggaattgcttgtctttctggaaatagatcggttcaagtttaagggatttttttggtttgctattgaatttgcacttattcgagtatagacttgtcaataagatgaaggtaatttgattttttttgttctaacaaggagacccaacctatggaaaataaatagtagtattgggatatattgacgagtttaggattgggtctttcctttgttgtattgcttttaactgtaaaagtcgccgtttctagggctatgaagcttaaaattaatacatgatactaatactattttagatttatcctgacttgaaacaagttcaagagcttgctgaaaagcacaaggctaacaagattcccatttatggagtaatccctgccgatatgctgactccttcagtagcctacttgaagcttaatcaaggaaagaagtattcgtttattttagaaagtgtcactcaaggagagagtgtctcaagatacagttttattggcagcccttatagaatattaatggccaatggaaaaacagatcctttggcacgtttagaacgtgagttgaaagaagttaaaacagcccctgttgagggtctgccatctttcagtggaggtgctgtgggctatgtttcttatgattgcatcaaatattttgaacccactactgaaatgcctttagaagataccttgggtcttccggaggctatgtttttcatgaccgacgatttagtcgctttcgatcatgcttatcagactgtcaagataatttctcatgtttgcattcagcaaggccgacccattgaagaggcttacgaagctgccgttttcaaaatcaatatgcttaaaaagaaacttgaaagtcctgaaattcctttgcctgagcaaaagaaggtccatttaggatacgaagctaagtcaaatgtaggcgaagacgggtataaagcatttgtttccaacctcaaggaacatatctttaatggcgatattttccaagctgtcccaagccaacggattgctaggcgtacagatttacatccttttaatttgtaccgccatttaagaacagttaacccgtccccttatatgttctacatccactgtgatgatttcgacataatcggtgcttcccctgaattactggttaaatcagagcatgggcgtattatcaatcatcccattgccggaactgttccaagaggaaaaactaaagaagaggatgaggcatatgccaaggatttacttgctagtgtcaaggatagagctgaacatgtaatgctggtggacttggcaagaaacgatgtcagtcgtgtctgtgatctcgacacaacaagtgttgacaagttgatgactattgaaaagttttctcatgttcagcatcttgtttctcaagtttctggtgttctgagacctgataaaactcgttttgatgcattccgtagtatatttccggctggaacggtcagtgggtctcccaaagtccgtgcaattcagctcgtttatggattagagaaagaaaagcgtggtatatacgcgggagccgtaggtcgttggggctatgaagatgacaacatggatacttgtatagcaatccgtacaatggtttataaagacggaactgtttatttgcaagccggtggtggtattgtgtttgattcagatgaacaagatgagtacgtggaaactttaaacaaactacgttcaaatgttactgcaattgaggaaaccgaaaaattatacgctgaagaagaaaactcttcagcataaaagtaaaggagacgctttcggttctcgttgtacatgttattttaaagtgttgaggtttttaaaaacttttttgttgtctttatttttggtaaacgaataaaacatcgttataaaaaattgtattctgtaatctcgttgtccacttgtagcaactttgtctattcattgtgagcatggtgagccgatataaactttccaacaaagagttcaagaggcaatcaccgaaaattaaaaagatatcaaaacgacaattccgaaagtgttctctttcacgaaattatctaaagctataataaatccaagtgaagaagaacaaaattatgatatgagggaggaatatatatctctatatatgcatatcaatacgtacaatatgttgtagccaaaagccaaaaaaaaaaggattagataaaaatgtgtaaggtatgacatgaacggacgcaggccataaattaaaaacttttagatgattaaaaaaacgcatctagagtattttttataacaacaaacatataaaggatgaaaatggataatttttagaaaagaattgaagcatagtctaccacgtgttttcttcaccattttgatagggagaccagttcatttctgcattctcctccatattcagttcgttagcagaaagttgagtaggctgctcttcgtcgagatcacgaactaaaactgcaagcttttcctgaagaattcgtaaaccttgaaccattatttcattgggtggtatagaaccgacactttcgacatccatataaaaccgacgcggttcctcttggaagttgaatggttcgccttcccgcggtggttcttcccaatcggcatttttgctttttggccactctgcatctgcatcattctcaaaccagtaatcagtatgctgtaacttgttccatggatcgtattcaaatgcaacagctgaagtaggtgaccacttagcatgttctttagctatacccttcttggcaatgcaacgcagagaaatttcctgctcttttctgagtttgcaaataagcggtccgcgtgattttggatcggcgagaatagggtgtccaagagaagagttagaagaaacaacaagatctctagcataaatttccatcgtaccctcaccagtacatttggcatttaggaacaactcgactgaacacttgggacaatactgatcgcaatcgcaattgcgcgtatattccaaacctactggaggcggttcatcgatgttggagctatccagaggtatcataccaagacgatgtgctagaaactcatcaggcatgactgaggtattcacattaatttcaactaggtcaatggctaaaacatcattagtatttaattcaagaatgaacctaaatcttacccactgttggaatctctgcaagtacaacacgtcgcagcgagtttgcaactctttcaactattagaaggaatttcctagagcttttcacttacgccaaacttgtatttgtaaggacaaaatccaccgagtttttacttatatttcgtatcgtaatatgcgtttctgaatccataatgagaatgtgtcgtttggtctatgcttgttgcagaatttcatactcatttctcccattccgcactgttaggtgatcccttatttagcataaggacacactaaactacgttaaatgcgagatcaaggaactcgcttttaaagagagcaagcaacaattgacaagagagtacgaatctacggcattaggcttaattcattaatatttatattctctgttcatcccgacagaatatttgaataaaaacatattgtttcaaactctttcatttttgtttggctgattattactacaactttacattttcgccatgtctagcataggcggtaaattacaaaaatctttgcacaagattcgtgctggagctttagggattcctttaccaaaacatattcaggaagtatctattcaatattctttagacagccgtttgggacatatgggtgctaagtaagttttgtttattcgtgttagaatcatcgatgttgtctatgtactggtacctcaaacattttatgctcaattcatgtttaattctctcaaataactgcttgataatactttgtgtgaggaagcactgatctacgattccgtttcatgcgttgttcattgctaacgttttaaattctagaaaatttgtaaaagaatgtcttccttcattgtattacaacaattacggcttgaagtttaacgttaatcaccgtttaccgaacgatcaaactccaacattttccattatctcaaacaacaaagtaatctattcgtacgacatgcggtcaaaacagctggaaacaatttcttccgatattcaaaaagcgcttaaagaacttcatcacgagtcatccccggaaaacattaaggaagcgcacaaacaagattattcacctccttctaattaagcaaaaacgcttttaaaattactttttttcagtgaacaaaatatgcatcttttttttttctaaaaaacctttagttttgctgcagtccgtttactgtattcctttgtttgatgatccataaacctacaattccctattttcttttttatttaaaaaagttgtttgagtgaaaaagaatgctatcttgaatacgagctttagtctaaaaaatacatcggcttgcattaagatttttctatccttgaacgagagcgtaaatgccgtaaaataaaagaacaaagaatgaccgaaatattctaacttggtataaatcatatttgttgattgagttctttgaaaaagtttttgtacatgattatgagggaatgaactaatgatcgtttggtatgacaaaatagcgtttctcctcttacttgatcgtatttttcctaaagaaataaaatttctgccaactttgtttatatccataatgcaaaattcctgctgcagtttattagatattgaggttttttttcggtcagtggaggaaagtgaacaaatttgattgtagagtttaaaaatggttgaaattgtgatcatatcaaatagccaaccatctaaattacgaagtacaatatcttttttacaatatcctcttaccaaactcttcgggtttctgttaacgatgagcatgtacttgtaaacgattcaaagtttaactgaacagaagatgttatctaactttatcttattaagagaaattgtacaaaaaaaaacagagtgtttaagttgatgtttgaaaagtttaaaacaatactcaaaagtgcgcattcgatgctttgttaccagattaaatagtagaacataaaattataggaatccatatttagttagttatgaatgttcttaactatcaagctatgaataatagaaaatttaaaggaaatacattctgttttaattcaaggtcttgctagtatttacataaatagtgcataccaaagtactgttcaatgctaaaagctccaaaaaaaacataagctagttcatgtttactttctatataataaaattttttacttaacaatagtggccgtttggtctagtggtatgataccatcttagggtgatggtggtcgtgggttcgattcccacaacagcccaattttttgccagtcgaataacaatagaaagttagatgaaaaatggcccttaatgtgatcgtgatatttgtttctttttgagttgggtccaacttggaattttaaatgagacgtactatatacactgtcaaaggtcattcattactcggtttttaatcatcttgcttcgatgccttctactgccttatgcacacatatctggatcatacaacaaattgccgcatcccctatcagcggtggtacgttccctcttcttattttcttcatgtaattcaaaaccacaaaccaccatatttagcttggaaaatagtttaaacacttcgctcgttttatattcattgattagctttttcgacttttattcaaataacagaacgcacaatgctgttttaacgatgctaataaataaacattaaaagattgataagaattccaaagcctggatcgctaagcatttctagacaattctcaatcacaaccataacgataccctgcggtgccttatttttgttagttattcgacttccggtaaataaacaggtacaattagaaccagaaactgccaattttggaagatggttagatcacgagtttctcctggattgaaattacaatccgatgcatcaaaccaaagcaatgataaagagaacaagttactggcctacgtaaatgataatagacatttttcactcattaggtatgatttacgtattcttgtttacaccattgcgaaaggactttgcaaaaggattcattacttgaaatactaactagaggattgtagagccctccaccttgcagacttgattactttaatgaacgggttttgcggtgtcatgagtatattttcaagtttacgttactgcctaagcggacagcaatcagctttccatttatggaatgcaatgtactttatgccatttgcgttgttttttgactttttggatggtaaagtggctcgttggcgtgggaaatcttccttaatgggtcaggaattggatagtcttgctgatctggtatgtataacttctcaaatctgttccgagactattttcacattggttgctttgacatgataaaaacacgaggaacatgataagaggcttctttggttgaattttttcttcattttagctaagtcgagctttttttttttgcttctcgttttttacattatgtcggtttgttcaatgagtctgaatttttctcaataaacatgcgattgcgtataattcttgattatatatattttttctctctcttatccggtctttttatatcattatactaacaaaatagatttcatttggcgtatctccagccgtctttgccttttgttgtggattccaaacgttccttgataccgttatactttccctttttgttttgtgtggtctaactagattggctcgttttaatgtttctgtcaattccattcctaaagatggatctggcaagtctcagtttttcgaaggaacgcccattcctaccaccctctccttagtaaccgtttgcggagtttgtatcttaaagggaaagactcatgaaaatctaccttggggtgagtggtgtggaaacacaccttttgcatttcacccgcttgtggttttgtttgtgttgagtggaattgctatgactagtaagaaactcaaagttccaaaaagtacgtttctattacattcgctcaaatatgtttagaatgctctttttttttattttgtttatattaactgatcgattttttagtttgatcaactgatgcttttattcaatagaatccaaatgaaactttacagtacagcgatctgggtatacacagtttttttcactttttgcttttgatgttactcgcatgcgaagccttttcctctcttaaatttataatccttactgaatctcttctcatatcctgtttttccttttttcttccatttcgaagataagtctgtccttcacctattcgacttaaccatttttaacgtaaatgcactcatcattgttcattccttcccccttttccaaatatgtatttccgtccttttaacaattagaagctgtttttcaacttaccagttttctattgctctctttatgaaaaacttatgaaattgaattatttcaagtgattgtaccctcaacggtaaaatatagtaaaattcctttaattattatttcttatatagtcatcatgatgagcaaccaaaaataaaattctttataaaaaagaaactttcccaaaatgatggtgaaaagtaatttttccttctaaataaataatgttttgtaaatatacactatgaggatttaaaatctcctcgtcaaaaactaatgaagaccctgtttattattttttacaacagccacaaccggatcaaccattccttggttttcagaaccaagtcccttcccccgagaccaacccatcatttctaaaagttgttttcctttgccattatttatagcgggagcgctagaaccaacaacatgaccgtccatacgcttttttgtattggttgacacacttccttcctgtatttgcacgcgtttcctttttttcaaacctttaggagtcatttcaacaagtttggattttcttttctttgacaatttcacgtcagtttgaagtgcaaaatgacgatcatactcaatcatgctcaacgaagtctcttcttccgcaatgtggctcatataatctagttccacttcttttctcctttcaccaaacagcatttcatatttttctaaagcatcctcattgctcaagtgcttcgatggcttcttttttggttgaacaatctttggcttccttggaggaggttttggagatgcctctacattttcccattgagaagatgtaataaaagaaccgtcttccacaataattgccattgtattaataaatgttcgaaaattcagcaaatttacaaaaaccagcctgagttggcattggtgctataaagaatgcacaacccaagaaacttaaattttatgagatcaaggataataatagggatttattaaaatcaagcctgactattccacaaattcgctctcaattataaaagttttgttcgtgcagtatagcttgctactataaaccaagtgtgacttggttgatgaataattgttactttgggtaagtaaatactatcgcagtggttttgatcaattattagcaataccctgatagaaaggctcaaatataattttgcatgttaaaaatactagaattcttcaatgctgtccggcaaaaatttcttcaaacaatcaagttttaagttgacgccgcaagatgtctttcattttcttaaaagaaaaaaaacaagctaggtcatcaataaaataatatgatactggaaataaacattctctgatgcacatttactaatctttccgtctgcaagtttcataacctcatattaggaaaccaactaccctgcatggattaatatttagaccttagactacaatttgaacaatgttcttcaaacacaccttttctaatcactagaataacaggtccaaacatttgtaccatacattccgtatgcacactactaaacaaaatccctttattcaccttaaactatgcaaagataacagcaactacttacattggaaaggtaaaacaagtaggtaaaagtgtataaaacaaacttttcatttctaaaaaacataaacgtcaaacaacacccaataacgactttcatgaaaaacacaagcctattctacaaagacagggctcatgttttccttatagttctcgccaagtcaaggaaagtttcgattcaacgagacacacagaacaaaaaaaaactatttaatcttagagctgatttcctcgcccaatgcctttatttcttcaggagaaataggataagagggccagcctactcctaatccatattcttcgttaggcttgggaatgatatggaaatgaacatgatccacaaattggtgagcaatgcgaccattgttttgaagtacattgtaattttcaggaccaatagcctttgtcacctttttgacaaggggaagaatatctgcacaagactcatcgctcagttcatgcatcttagcggcgtgctccttgggaataactagtgcatgtcccttagatgtaggagcaatatcaaggaaagccaaagacaaggctgtttcagctagtttcacacaaggaatatctcctttaacaattttacaaaatatgcagctcatagtggtggttagcttaagtcaaggatgtgcaagtgggaaaattatcgaaatttaccgtagttaacgtaataaacagtgtgaataagtcaaatgtttttaaaaaaaatgtaaattttaaaaacgacttacatgaaatcaatagttaaattcttccttaaaaatggagtaatcggcgaggttgcatttctcaaaaagctttgcaggtagtcatccttgaaatgccaaactcatgtcacacgaacaagcctgtaatactaatgatatttattaaatattatttggcattttaataataaagtatcttatttttcattactaattcagtcagtttttgccatgatcagatgttttgtgacaaaagattttccttttggtaggccataacaaatcaaaaacctagctttaccataagaatgtaggtaattatgtacggaaagaaagaaggaataatatgtgagtctcgactagtcaggtttgattttgttaagacctttcagaaccaaacatgtagaattactcttgctcttctataacagctttctcaatgcaacgttttgtaccaaagagtaaattgcagaggtagtccagtataaagacaatgccgtagaagtcttaaatgccataaaagatacaaagaaagcagacattataccagcggtattgaatattttcagcaatcgagaatccgaaggtcgcttcaatatagacatgtttgttaaataagtaacagcaaggaccgcaggtagtacaccgtgaggatctggtaatgtgagatcggtaaaccaaagcataccctctgttgacatactctcgggacatacatcgactgcctgtcttaactgataagatgcaaacgcgaataaaggtagttgagtaataggcaatgcgtaaatcatgagaggatgacaattgaaccttttgtacagcttttttcgtacagtacggaaatcggtatttgttcggcaacgtttctttgcttctttgatcagtggttgcacttgcacaaaccgacgagccgttttaaggcttgcaatagcaattggcaatgtaatagtagaacgaaggaatatagccattgccggaatttcatagcaccatggcatgtacgagtgaacgcctattaatgtttgaagcatattgacctttttaataaattatatttaaatgcgtaagaaaaaaattttgtagttcagaaaaatatgggtgtacatgaaagcagaagatgtaatatcatacacgagatgaggtttgggaaggtgggcaaatttcgagtttgctggtactaacttctagccaagaaaaaatagttgtatttcatgtttagtattttaagaatgcttcaaatttatagcatggttattttttgtaattaataacgcgttttcgatgtttattagaacgatttattataatgagtgggatgctacagaagtacattacttataaatataaattgagctgaacaaaatacatgagtctgattgaataaaggtaagcaggaaaaaaagatattcgtaacaattggttaaaaaaaaaggacttacagcttaaaatattaatataagttttataaagaatcatacacattgacattaaatttgaaaaactgaaagatactaaatcactaatttatgggcattgctgtcaaaagccattctaagattaagtcattagcccaaaatgttcaatgtattcaaatgttagctgcaaacgcaaagctcatttctatcaaactaatttttaagcatcagctaaatcttcgttacaaagcaataacagtttaccagtagtggcacgactttcaatagcatcgtgagcttctttcgcttcagaaagcttaaaaatatgatgaattgcaatattgagattgttgtccaaaatctctttccatagtcgcgatacataaccctcaaagacagcatgaccagttatgtagccaaacagcgacggacgaacaaatttaagacaacgggcagataggaatttcaaagggatagcatcaatggcaccactagcatttccaaaagaaaccatagtgccgccattgcgtagcgcatctaatgacgatgaaagtgtatcgattcctacagaatcgtaagcggcatcaacccccttaccatttgtataatctgctactactttggtgaggtcttcataagagcaagcaatttcagcaccgttttttatggcaatacgacgtttggcggcagtggatgccgtagcaatcacatgaacatttctggctctcagcatctgacaaagaagtaaaccaactccaccggcagcggcatgcacaacaaccgtgtctcccgttttcacaggataagcttcttcaataagtgtataagcagtaaggccttgcaggagagcagcagaagcgatcttcaatggaatcttttcagagaccttactaactaatgtggtgggaacgttggtatattgggcatacgcaccaaatggtgtaaggtagaccactcgatcacccactttgaaatctgcttcaactttatcgccgactgcagcaacaacaccggctgcctctttaccaggtatataaggaagaggagcagtatacaaaccggttcgcaaataagtatctatataattcaatcctgcatatgcattcttaataaccaagccattgggtgctggtttgggaatttccttcgttattacttgcaaaacggaagatgggccggtcttggaaacctgcactaataaatttgacatattataaaattactaaacaagaagagcaaataagttggttttaaagcgtaagtaaggattatgggaacgagtggtaatagttatcgttttataataatgaggttaggcatggagatcgcagtgcaacgattgaatgagcaagaaatggcatcgatgtcgatacaggacacccaacttatagttggcaaggaatctcctagaagaaaattactaatcaaacatgatcttgttttttcgtaaaaagaccattaaaaagggaaaaaggatgtttgtagatacaaacagagatgcgatacatgaagaatggtatatttataaatgttttagacggtctaaacgagcagcaagctcttcaaaagaaggagctttattagaatgtgttaatgttggatttgtgggtaaatagttagaggattgcagtgaggatgcatttgttgatccattattctgaggttcagcgcgttttgaaatgttagctagattcccattcactttttcatcatcttcttgagtgttttcttctttcaatgaagtaggttgttcacgattctcagaagattcgaggttcaacattgtatcagcttcagcagaagatgggatatctttattagcttctttaggataatcatttggaaaataagtacgaattaactcttttctataggcttcgactagttcatcctttggaataggagggtataaaagttggtaaaactagaattgattagcatacgaactttttttagcgcgtttttttattttcaatgaaaataaataacagaaacttacagcagtatcattagtagctagatcagggtcacttaatcttgcaaactccttgccatacaattttactagaaaatcatgaacctataaataataaacaagttagttataaaaaactaaattttaaaaatttatctttaattgttgacttacaaatcgcaattctttaatctgtaactgaggtgcagcagccataacatgatacaaagaagatttaaacgacatagaatcattaaacgcgcgtttctctaacactacgcacctattggcaagtatttctacatcaacttgaagcaattctaacaactcaatatagatatcctgcataattaaaggttcaatgcgggctttggccaaagccggtgaatacgactttaagcccaaagcaacattccttctagcttgtttggctaaagcctcttccttttgtcttaatatttctatccttgaggctgctaatttcagttgtatctgtagtcttgacatattggtttatgctaagctcaggacactaataaccagataagtatgttttcacgatgaaactgttcaattatttataaaaataaatagaaactgaggaatcttacaaaaacattcaagggatgctatatatactggattcgaaatcaagaagctaatgtgttgatatcgcgtttcaaacgttaactcatggtgtaactcagcttagcaaatgtttagatatttattctaaatattcagatgccttttatattaacattgaaaagttgaaagcaaaacgttctagtcatctatatttgctaaatacttgttcgtgaacaatacgctcaaagtcctgcgagaaatgcttcttacatctatagctagtattagttatattttaaacccacggatttaatagaaatgttcaatgatagctcggtccctgctaaaagcactttttgtgcaatttctgaaaccaaatatgatctagtgaaacgtacatatgggtttgaatgaacattcttctttagtattagacttttttttttgaatttcttttaagcatagatctttgccatgtaaggctgtaattgctatatgccaagttgttttaataatcatcgatgaatttacaaggttataaagtgtcttactataaatactatgctttactaaaatctcctaagctatagtcaagtttagcacaagcagccatatcacatattcaaaagagtattttttctaaccagtaccaagtactggtattcgagcaatgtctgttgaagtagataaatcttctcattcgaagcctaaaattgaaaaaaagagcaagagaaataaaagaaaatggcttaatgacgagaataagactcatgttactgcttctgaggctgccattgagagattgaagaaatccgctagcttttcacaagctgcacaacaagctttaaagcaatcgagaaaggaagacaatgagcgagatatagaaatgcaggatgttgatgctgaagctcaacctcatgatttgttaccaattccacaaccatcagttgaagactttgtagattcaaaaccgcatgttaaaaatatcacctctgtcttgcctaaatggctagctgagcccataactgtcgatcctaatacaactgtggaattctcgtctttaaatatatctagtaaacttgtcgagcgacttcaaaaacagaacatcacccgtggatttgctgttcaggctgctgtattaccgttactcttacaagatggaagacacggtccgatgtatagttatggtggagatgtttgtgtaagtgcagctactggcagtggtaaaactctttcgtatgtgattcccatcgtccaatgtcttagtcaccgtacagtacctcgtttgcgttgtgtggttattgttcccacacgagaattgacagtccaggttgctaaaacctttgagtattatatgtctggtgccggtttacaagtttgtgcctggactggtcaaaaaagtttacgacatgaaacatatcaactaaatggtgatgagaacgaatgtcgtattgatgtgttggtgagcactccaggtcgattagttgaccatatccgaaatgacgaaagtttctctttgcaacatttgcgttacatggtaattgatgaagctgaccggttgctcgatcaaagctttcaggactgggtggatactgtgatgatggaaatatctcatcctaaatgtcttcagaataaatcaaatatcttggatttagatcaaaatatttctcccacatttttacctgatattgacacacttttaccatatcgtttaccttctcctttacaaaaacttgtattttcagcaacgttaactagagacccttcaaaaattgcatctcttaaacttcataatccacgtttggtcctcgttcaaaataaagatatggaggttgatgatggtggagaaattgaggacgatgcaattgtatttagtgttcctcctactttgcaagaataccacgtctctgtcagttcagaaaaacctatactactttaccatttaatacactcaaaaaatttgactaatattctttgttttgtcaagtccaatgaggcagcagctcgattacaccgtttactggaattaattcatgaatccttgaatcaaagtttctcctgtgggttatttacctcatctttatcaagggatgagagaaaaaaaattatcagtaggtttgcaactggcgatttgaatttgttggtgtgctcagacctgatggcgcgtggtattgacgttgctaatactcaaaatgtgattaattatgaccccccgttaagcgttcgtagctacgttcacagaattggacgtactgctcgtgctgggcgtgaaggttttgcatggacacttgttcaaagtcatgaggggcatcatttttcgaagctggttaagcaacttagaagaaccttacccataaaacgtataaagattgagttttctcatatttcggaagagtttgtagtcgcatatgacaaggcgcttgaggcccttcgtgtggaagtattcaattcacgttatccacaacaaaagtcctttttaacttaactcattaaaaaaagaaaagttggatataatgtgttcagctcattacaacttctacgctttgtctttaggttttatctaatcttggttggtttaatttataaatccatgattggtcttgtcttgctctaatagtattatttggaataggctgcttaaaagctgtggaaatttaataaattttatggttcgcactttatattttaaattatataatattgtaaacatttagttgacgactcgtcgtcgaggtagtataaatcgtaaagttcacaaggatgattatctacgtatataatcatttgatttgccttttctccctttacgaattgatgctccctcatttttattgatcatgcgcaattcaacgaccacccaggtctttttgagtacccatgtaaagatggactcagaaaagcaaatttgaaaatgagcaattccaaaaagaggttcataatagtgtatttcgatctatccaaaaaattttctttaacttatatatcgacaagaatctaataaaactacttttcttcatatttcggtttcaagtaacaagatgcccacataaacacttggataatgtgtacaatgagaggcaatcgtttccaagtgcttataaaacatcatgtttaagtgaagttaaaagtttttgaggtgatctccaaacaaacatataaactggtattactcgcgccgttttattatttttaagaaagccattaatgaaaatcaacttttactgtgtttgtttgaatttccttaaataattatatcaaaccacaccactctgcgttattcatcctccttagtctcaattctccaacaaggtagtttcatctgtttatatttatttaaccctcgtccggtatttcctaaaatgaaatacatcgtggttccttaaacatacataaagtaatacaaagcacaaccgtagatttccggtttgacgataaaagcggtattacgagcggaagccttgatgtcggaattaccaaaataactgtgggatcccaattttttagatttttctatctcctagtattgtatatgatatatcatctattgttaaaaatagactatatattttgacaaactcttgatttgagactatttttagggacaacatttccttacaaaacgtgtacctggattctaccagtcaatactgaactgtccaacatcaattgtcgtgtttccttaaaaagagaacagttttttagcactcatcgtatttcctgtttctaccatctactgtagaataaagaaaatggctagtaatcctcctcaacctcaaggacctgccttgacagcacatattcttaataccatgtcgggtattccagcagctggcgtacaagtggcattgttcaagcttaacgagtcgcctacgccttcacaacaattcatagcgacgacggaaaccaacgctaatggacgtgtaacgagttggaacgttgatctctcgacagtggagtcgggaatttacacgtttcgttttgaaactggtgcatattttgattccctgggtgtcacatctttttacccatatgttgagatggccgtacgcatcaacaaggggcaacattatcatattcctctacttcttgcaccatacggctacactacttatcgtgggtcttgaaataaccacaatgcagtttaatgaattccttatatgagcttgtgtattattttacgtattcgcaaaagtcatttacgtatcgtaaattgtaatcacaatatgatattatattggtacgctatactgtgcaaagcccatattttttaaagtaggaaagttggtgaatcgtaagcctgggtattgtaatatggaattataaacgtgcttaacattaaagcaaaacataggtgatggagactataattgctattccatatgcagtctaaactcaatttttagcatattatagggtcaaactttgtacctttaaaaatgatttgaagtgttacaaaagttttttgtaagtgagcatttgaacgcagtgatggctttgacgtttggaaaattgccattttactcaagtatagggaattggatcgttttccagctctgaattctaggaaccactatgaacgttcgattttaaagcgtaatattttctgtggaatagaaatgcctataacaattcgctacgataaaagaggaagggacaagcccctatttggaagtaaattatactaaataatcttaaaacaacattttttaaatgaatatatttacagtatgccctgtgtggtttgatttggtttttttttttatggacattctgagtgtttcaacaccacctttacactattttaataaacctcacattctgaagtgaggaacaaaacaaaattacacaactactataaaagtctctttcattcgatttaaagaattaccgattattctttagatggatgcttcatttcagctccagcgttaatagtcttcccttgccatgctcgccgatattcatttttagagaaggggacggtttggccgtttgcttatctgttagagaatgtgtttaacatgcatggaaagtactatcccccttcagcattcgggaccattaataaaagtccactttcggaagatggcattacttatcaaagtaacaaatggactgattaaacatctttttgataaaagaaaataatgtaaatttcatactctatatataggttcaacatgtcgcagtaggtttgagggttttttttttttttacaatcttgttaaactgtcttgctgaggtttgaaatttaactaattccaattgcaattcacaagattttctataattagcttgggtgctccgaatcttttcttcccttgattacagttttttaaaatgttgttcttaaaacttgtggcatctgtgctggccctaatgactattgttccagcccaggctggtttaattggtaaaagatctgtttttaaaccaaaggtgatgattatcaatatgttttcactcgaagcaaacgcttggttgtcacagatggatgatctttatgccaataacattacggtggtaggcttaaatcgactatatcctcaagtgcattgtaatacgcaacagacgatctgtcaaatgaccactggtgagggtaaatctaatgctgcttcctctattatggcccttactcttagtcccaaatttgaccttacggaaacattctttttgatttctggtattgctggaattaatccatatgctgcctcattaggttcagtaggtgttgcccgctttgctgtcgacattgatttaattaactcagtggatctgcgtgaacttccaagttatttccaatcttccggttgggagattgacactgatccttatgaaaatggatctagtaatgaaatagtgtatcccgagtcaatgccttatcaaacaaacctttatgagctcaataatactctaattactgccgctatggaaattataaaggacgtagtccttgaagacaatgagaaggcggctagctatcgcaagctttacaatgaatctgccgcacgacgtcctccgtttattacacagtgcgatactgcaactggtgataactattgggctggtacttatatgggcgattttgtcagtaacatcaccaatgttctcaccaacagcaccggacactactgtacaacgcaacaagaggataatgcctctctcactgctctgacacgtgcctcgtttgacggcttggttaatattaaccgtgtggtaattatgcggtctggatcggattttgatcgtggtgctggtaatatcactgcgcttgctaacttactcaacagcactggacatgtttcctcattggcatgtgacaatctttatcacgccggtgctcctttaattgaccatattgtaaatcattggtcttactggacttaaattcttttttcgtctctctttaggttcaaatactcccatcttaataattgatgtactatcactcatttttgcgtttatgtaacatggttctcacaactcggactttatttgaacaaccaatacacttacttttacgaatttttctctcattagatcggcaaaatatttattgtaacaagcgaagctttcagtaatagcataactaaaggttcggtgtttagtattccatatggtattagggcaacactaagatcaggcgtaaagttggttcactagggaaacacttgttttagggtttggaagcacgctacttcctgttaacttattttgtttacgaaagcaagtggataacgaattggttgaaaagtttccggatgtaatcataaatgctcattcgttcacctatagcgcactccattgttgctctttttgaattttgcaagactcatgttgcggtttattataagataagtaggtcttcacttagttcttcgtaagtaggtactcattatgtatcataaagaaaaagactttagtgttaatctggtaaaattttacatgtttgatatgtagacatgctttcatgcaagacggggtgaatattgatcgcaaaaaggagactttttggacctcatcgcaacttgcaattaaacttgtactttagcgagaccgccgttctacttagcttagcttgtcccaaacgggtgtgtctatgagaacgcccatcaactggagtaaacgtactgaattaattagtgtgttactagtcggcatctgtcaaaaccgcaagcttcaaatatgcttataacagctttctaattttaagatcaaagttaacgatcctctttatccttaaaaaaaaaaaaagaatacaaaagtcaatctacatattaactgtgctttccacttatcttctacttcttttacttaacattggataagcattgaagcgtatttaagcttattttacagctagaaaaaagttcatcgttcgaaatcataatattttattatgctgttcattattttgtaaacattaaatttgtttgaattgaaccattaaacaaaagtaaaaaaaataattaagcttgattcattaagaattaagatgaaggagaaatgaatgcaataaacgaaaatgaagttgtgaatacaacaaggaggaacagcgagttttccaatttcattagttgacgataacagtcaattagtgaactgctattttaaaacgaataaataaaaccattattttaatattcaattcccagcgtatgttattcacggagcctttcaagcaatgcacttgctcatccaattcgtcaggaaatgaaatatgcaataaaaatacatgtgatatagtctaaacatatcatgatttgtttggtaaatcacatttatatagatgcttctttccattgcacattcttgtagaatttatagtaaagttagcaatataattaggcttcattttcagggttcatctcatgcaatggaatagctgtgtattcattcacgtgttgtctggcatcacgttctaaaaataattagtgaacaaatttaaagtacacttctttttatcatcaaatttaccataaagtgctagtgttcttttcaccaaatctgtagagcaagatcccggttccactatatcgttagtattaattatgtttagtaaacaacaaacctgtttcagcaatgaatatgagaatgcttgatacagccatgaaagtgaaagcggatgccgagcatttccatccccattgttgatcacctaaatgtgaactcaatttgttttcagcttttaataaaaccaagcaaaataaagaacttttacaaaaagcaaaaatcatgtttctccactttttcaaaaagtgcttgactgccttggtccaagtttcatagaagtctaatgagttagtgaatgaacgtaaaattagtcctattgtctcacttacaagtcaagattattaaaaccaaagtgcaaacaagacaccaaaatccaaataatgtccattccgctgcgccataagtctcaaaaaaagcgtccttatactttagataacaaattgcgagtacattcagtacatagattggtgtgaatgatattagtagtttaatcaaaaaaggggaagaatcatctgtcgtcccggaagaatggttttctctatgtgcgttaggaggattgcttacacgtgcgtgatctgtttaaattaatataatgaaagactttagtaaagaaagaacatgttttaaaatgtgtgcattgcatggccgactgtaaacaatgaccaaagcatgcaatttgacaagatggcaagtttcaactttcaattgagtaattcctttcttattatttacaattcttacctaaatatggaggcaatgtactttcctcctctgaatcatattctgggagtggtcctttttccaaatcgatttcataatctgtcttcagttcatcttcttcatctataggacttttcaaggaagtgtaattattcttcgtttcaaagcaaactgttttttcaataatagcaagtgaaaagtaaaattccaaaactcattttcaaaatgtaattgcttctgacacatttattttgtcactgcccttcttattcaccccaacttagatttccttatgcatcattaagaaactcaacataaaaccagtatatacgtttactgcgttattacatactcactattgcaatatgtctttaggttattacgataacaaatcatcgttctgagtcacaatattttattatgctattcattatttcgtaaacattgaaatttgtttgtattaaagtaaaccattaaacaaatggaaaaaatgataattaagcttgattcattaagaatcaagatgaaggagaaatgaatgcaataaacgaaaatgaaattgtgaatttaacaaggcggaacaacgagttttccgatttcattagttgattttaagttgtcgtaaacaagttaaaccattattgtttgtgtcttgggttccattaaaaaagacacataattagactcgcatcataataaataagagattcgaatctcaatgcatattatccagattatccaacatcgcgaaccattttaagcgatgcattggtttgacaatttttggtaattgaaagaataagttaagcatacattccataaacttataaagaaagaggataattaaagaatgttagtgcttattttttaaaaagccgcagcttctctgcgttggtgattgtcgtaaagaggttttccaactggagcgacaactacaataataaagcaattagacttcgctttcggcctccgtttcttccaagggaatgttattattattatcgttggcacctctaaacgcatttcctatccgcccaattgcatttcctatccctccaaatgcatttcctataccttctaatcgggtaagtaaagaatcattcatacagttggttgaatacacatacctaggaaagaagctataccattcctgataaatttgggcatccttttgagagcacctggacattctgatacggttagaataaattacagaaatattaaacaaacccatttcgtaaaagaaaagaaaatttcctataacaaagagtgaagaggcttcaatttcgtagcctgtcgcgtcgatatgtttatcaaataaatacatcaaacctttcgttacaataacgacacaactttgtacacccagcacttgaaacaaaccaaaaagcatatgcttgagtgtccaaattggaatacaaactgtatgttagcgtttagcaagataatttcacttaccaagcaataaaatgaaaaataaagcagccgaaatactgcatgtggaacagatgagtgccttatttaagtttagtctaccatccttgacgcaaccaaagagtataaaacaaatgactacccatgcgagccagattgtaaccaccaaatctttttttgagttatacaaaccgaccgcaattacctttacacattttgccaagaaaactgcagtcacctttacacattgtgccaagaaaattacagtcacctttacacattgtgccaagaaaattacagtcacctttatacattgtgccactgcctgggtccaagtttcaaagaagcctaatgagttagtgaatggacgtattaacaacttcatgcatagcttacagaaagtagcaataaacaatattggacatgttataccaattgtgacggagaaagctaccttgccgaatatcgacttctccaacgggtttacacaaacccatgcagtaaaaaagacaacactaactgcaagaactgatattagtagtctcagaaggaaatatatatttggatgtgaatctttgaattcttgtcttctttcgacattgggattcgcaatttctgtaggtcctgtacttgaatcctcaggtacaggattagcaagtttcgaaatgtctgcatttatagttagcctaaagcgtaatatttaaagaatgagtaaaatgtatatctcaattatgaatgatttatcttgagttgataacatgagtaaatacaatgtgcgcatgtttgaaaatgatcaagtgttggatatgccaactgtaaacaatgatcacatccaaattattttacagcaatagaaagttacaactttcaattgaataattcctttcttattatttacaattcttacctgaatatagaggcagtgtgccctcttcctctgaattatattctggaagtagccctttttccaaatcgatttcatgatctgtcttcagttcatcttcttcatctagaggacttttcaaggaagtgtaattattcttcatttcatcaagatcattctttatttaataaaacacatgcgcgaattaattgctgtgattgcgacaaacgaaacagcgaaatcaagaatattcgctctgtagtccaattccaatcgctttaaagactttttaacaaaataataaaattgttcaaacaaatttccaactaattccttcaaacaatggcataaaaaaagaagaacgaaaaaactgaacgaggcagtgaattgcttctgacacatttattttgtcactgccctttttattcaccccaacttagctttccttaaacgtttttgagaagcaaacgttgtagtataatataatgtcagctacgcagtttggtatctggtttaacgaaacatagcactgcggtgaaatttccttgtgacctatgatattacgatacacaggtagtaggtattgtactattaagttgtattgttacctatcacaaatacagcttacaattgtgtgaggagtgaggttcagttgggattctaattatattgttcaaataatatagatcttaatgctatttccatcaaaatttatctcaatatcgtatcatcggtaatacaatataccaaaagaacatgtgacatatagtgatacgtaacgaatcctattataacgtagaatagcgtcaaactttagggaagcgtaacatgttgcagtattgtaagtaacgtgtaaagcattattggttttgctaaatgtatcacagtattttgcggtatttgtgttggtcgtgcttacacgcataacgcagcgtttaccctttacttagcaccatatcattgtgtgtggtttattactaggagtctcaaaaaatggtaagaaggtctcatgctatcgtgttgattttaacaaagggtaggtcgtcctggcagtaagtattgtgaatcgtgggggaaaaggtatgaaaagtagtttagctattaacaaggacttgaggcttacagtaaatttgtttagccatcatctcgagacaatttcgtgagatgtctcgtgtaagagtagaaagccttttgtcttccttccccgctctcgtttcggaaaagtctcaaaataccacggtggagtctgacaacgtcaggttcgtataccaaccgttggacgaactgtatatcgtgttgatcaccaatttacaatctaatattttgcaagacattgatacattacatctcctctctcaagtggtaacatcgatttgttcgtcgcttgaagaacgagagattctggaatatgcatttgaaatctttactgcgtttgacgaagctaccagccttggctacagagacaatgtatctttgacacagatcaaaacttatttggaaatggagagtcacgaagagaaaattcaagaaattgtatcaagagtacgtgttgaagcataggggtggagtcatcgaaattttttttgtatggttttactaatgcactttctagaacaaagaaattgaagcaactgaagaaaggaagcgccgcatcaaacaacttgaattacaaaagaaagaagctgcaagacgggcggctcagaatcttcccagtgcagatgcgtatgaatccattgggtatcaaacagttaatacaacctttgctacgtctaatgttgaagacgaatctgccatggagtcttatcacgctgcagcaaaggcttcttctgctcccaaagcgaaaggaatgcaacttggaaagaagaagaatactagcttgttatattaatttactattccagcgccctttatgatcattgcatccgttttggttcgtttcccctttgtaatgtgcttttcctacgatcatatgcgataactagaaataataatcatttttctatcccaaattaaacatcgtaatcaagagtcgaccattaccaactgtaatagaacactttgttcctttcataccctccagaatacttcctagtctatccaatcgaaaaaagcagagcaaacctatattgattcatcactcaactaatatacccgctaccctttaggaatgcttcctcttgtttctaggtaaacaatattagaacagagaaatcgtcatataatataacccatttattcaagtatataatctggttaagacttttaacccatcgttctataaacctcgtcaacaacaacaaaaaaccaaattagaaatctatttaaaaagtaaagcagattggcaaacaaagaaaaagcattctatttttgaaaataaagtgtccgatgagaaaagcgtgaaattctaatgagagtaaaccagcaaagcgaggtacgatgaactggtaatgaaaaataaaaaaaggtaataattaattgctttagcattcaataattaacaacaaagtcaaaattcctccaacagaattctcaataatagaaagacatgcggcaacggcggaaggataaaagggcgtaacgaataaatggagaaacctaaaagaaattaaaaaaaaaaaataaaaatataatgaatatatgaccatgaccctgggatgctattaaaatttataaaattgaccacgctgaaggattttaaatgtgactgaaagagaacttttggaagacaacgactctaactgctccaatataacatcggcaggattcgccgactgaagaggatgtgatttcaaatgagtgagcaaacacgtaagggtaggcatgataacgccataactctggaccagagattggagtatacaaagctcgttcactagatgtctagggcaaaaatgaccaaacaaaagagtatcagggatgtcaggagtggagcattcgataagaatatgagaaagctttctttgagcaattaaactagagcaagctctccaaatatgaatgttaagcggttctgaggctaccatatcgggttcgacgtccccgaaagccaaaaagtatctgtcggataggttattcctaaataaaaatgcagacgactttagctcttgaccgaaagaggagccatgattaacgggaaagggcaatatagacaaagtagtcgttaaactagtatacatggaaggctcaaccctaaaaagaggttagtctcattgtcaaatgagaaagagaaatgccgatggggttgatttagcaaattcgcataagagttaaattcattaacttgtttgaacaagaacaaaagatattagaacagtgaaagaaaaagagatataattattattgcaatctttgcaatctttcaaataatatcactgtctcacaaaaaaaattgcacaagtaccatgaaaccatgcaaatcaaccaaagcgtcagcagatagtttacatatatgcaaaatatataaatgtgtgttcagcaaatagatttgaaggaaaaaaagacgagcatacatctcttcaactaagatgaagaaaataaaaaattttcaaaactcaacattgccttcccaaccctcaacctattcactaaaacaatgaaaaaattttcatttgacagaagctattgagaaagaatttacttacacctgaaaattaataaatccggctttgtcgagggaaggccataataagttattaaacacgtgcttttttagggtatcgatcacatagtttaacccaactatggttctaggattttgaggaccaaacatggcgctattgatgacggctccatagatgtggtctaaatgacagtgtgtgatgagaaacgttttaatcctttgctctgaaaggtgccaggcttttgcgtatgattcattttccaccgtataattgtcatacttggtgatggaagaccaagaatcgacggacaggtgttttgactggatcaactcaaccaacgccgataggtggcttccaccatccagcgatataatttcttgaaatgcgccatcagaaatcaaatgactgctacagcaagactccaatggacccccctaataagtcagcatggctctcaatgcataatgtttgaattcttacattttgtccctgttttcgttaacgttagtcgaaattcttcaaaaaaaaaaatatttttcgtttttcataccaatgaatataatgtaaaagaattttctacgagtcctactacttgatcggtttgaaattcagcttctttgatttcgagtgctgcatgcatggctaggcttatggagagttacagatctccggtgcatgcactagtctacaaaaacatgtcggttgacgtcatatttattacaagcatacatttactaccgtagatttagggtacgataaacgatgctcgaaatgtggagaaactcggggtatagtgtagtgtgttaattatccttattcatgtgcccgcttggtgaagaagtatgctatgaataaataaaaggatggaagtcgttaagtggagaggaacgaagttatgctttgctgctttaagtaagatattaagaaaaaaaatgcgactttgatgaaacacgtttgacatgtatcacttccttatgagagcaatttttccgaaggttcaatatacacccttaaagaatgtcacgtaacgagaagagagagagctattttttatataattccagaggtttcctttttttatcgtttaacatttctgaggggaagttttgttgcttgtttaacaatgtcggcagaagtttatgcccttctctttaagagaccgactagcaaacaattgtaaactatcggacactaatatgttttttaaaataataattcattatacatacaaaaaactgaacctcgtgtaatatagatttccgtatgaacttggttctttatcggactttgaggattcgtaagtcccagtcattttatctgattatgctaaactaactcttactttttcatagagtacttagatagttccagtcagtgctgctgagaaccagtttgcatcagttagggagggtggtaatcgttgtaagagctttcaaaatatgatctccttttcctttatgcaagataatcaaaagaaacattcctaaattacctatttgaagaatcttttgtatgtgccgctgaaattgctttccattgaactttttgttggtctatggagagaaatcatcataggtgcatagcagcctttaggtagatattttaattagcaatatatcccaattttccctttgataatgatcggtcttttttcaattaagtctatacctaaaggcatattggaaacttgctataaaagtttgaaatagaaacaattctcagaatattacttgaatacgttctctgttttactcccttttttttttactcacaaagaatgtcacactgcagtatcgaattgctttatttgttcctttggaataaaaaggtagatttccttttattacagcaaaagataacaagactaataattaagcggctttgtttttaccaggaattgcattttatgacactacgcaaaattagaaatgtaaaaaagcgctttcgaaaatttccttttacactttcattatcaggattgacaaccctatgaattcctccgttaaaacttctcaccagcggaattcgatgaaggttgatgttaacagtatagactcaatagcaacattatacgaaaaatcataataaattgtgaataaccttttattaattgagcgaataaacatagagtaaatttaattaagattaataattataactaattttgaagaaattattataaagaaaataaatacattgaacatcaacacatccccttcaattcatatacaaagtgcatttctcgattttaggactaacttgaaacacaacgcacaaacatttccacaacttgatctttggttttggcgtgaaggttgttagtgctaagctatacattactccttatacttcatcggtagcaggcatggagtgcatttgataagcttgattgttggatgatgatggactgaaaacattaccagccgcatcatacgaggtaccatcaaaatttattggaggtgacctatttttcgatttgtcgggtctatttgtatcgccctgcgttgttgtacccgctgaagactcactagctgcatcccaactaatagttggctgcgatgtagaatacgacggaggaggagccaagcttccaaccgcaggagcgagtctccatttcttgatgtttgcttcaataaatacatatcctgcttgtccaagattgacatgtaaggtacaaggtccaattgcaccaaccgtaggatacaaatttcgatatgtacacggcagttctgcacaccgacgaccgttacgtgtaaagaagatccgattgcacttcggtttgtaaccaacaccaattacatctccctgctggtagaaagaggagtacggttttcccgtaaatggtgaattactgcggcgtgttccatccgacacataagcagtagaccaaaaattccaaccaggcaatcgaaacggcggatatggcttggtagccagaccgatggaaaccaaggtatcaataggtacgtctaaaagttttacttcaaaatagtatacttcattgatcctctgcaaaggcaaattggtttgcatgcaacattcttcgttgcccaaaaaagacaattcagttttatttttaacatagcaattatattcctgatttgggataaagtgccatgctaatacgcccttctcttgaacttgtaggaagtcaagcagctttgcatccgtgttgacgttagatttcatggaattcaactcaaactcacgagcttgtaaataccgttctttccccatatcatccaataaactaaatccttcttcatcaatatgttcattctctaacgcttcgtcgtccaactcaccaggattggtgtttttcagcaagatccgtccatgtcgtgtgtatcgcagtaataagatgactgacaaaagacagattaaaagaacaatgacagcggctaatgcaataaatatgaaaaggattgctaaattaggatgggtgtttgaagattcctgtaatctcaactggcgaatctgatcgggatgcatgactcaaagacgcaaaaaataattttttatataagatttgaaaaaggaaaatctgcgagtgtatatttaatagagaaataaataactgagagtaaaatcctagctataagaggatatagtatagggttaagagaaaaaggatttttctctcagatatgcagtttattaagcacgagatacaatatttaaatctaacgtagatgcaagtatctcaaatattgcactaatatggtttttgcgaatgctcaaggattgggcgaaatggtatacttgtttcaagtttacaggagaaaatacaaactcctttaaataaataagatataattcttaagataaaaaagaatttattcctgaaggagccacaatggcctgttgtaaggtaaaatcgaaaatcagcggcaatttaccagataatactgctccgtcacaattatgcttataagttttctgtttttacaaccatagattggaattaaccaaatttttattcgaaaatttactttgattcgttcaatgtttgcttccggatttcagatggtaatgggaaaaggaaggttacgaagcaccacgtaaaggccacatggatactactccgtccattaaccaacaacacctaccatgtcagggtctcgaaaacaagaagcaatagacgaattaaggaactctcttgatgttcctgctgatactgctcaatctgttttggaatcatttaattgggacgttcaggtatgtgacacggcaagcattcattttcagtattcgatagtgatcaattgctttgattgaaaaattccaagaaagttgttatttgcaactgaacattcatggaatcctctggttgtcgtttatttttctaatcgaattttcggtgaatgttgggactgagccattttgctaactgttttatgattaggaagcgatcgagagtttaactggagaatcgtcaagagtcgatagaaattcaaagcttggattaagtttcggcgtctttcaatctgttttttctttgctattcagtgggttgcacaaactatggatgattttgtcaagggttcctctgatttcaacatttatccccatttttggtactactaagcgtgtcctttctcctgcagacactgcgaacaagctggttcagaatttagaagagcaatacggtactgagcatattgatttttttactgatggcggctacatggaagcgttgacacgtattaagcgtaattatggagtcgcattgcttttctttactagctcaaagaatgatgactctgagacgttttccaggagtgttcttatgaaccaagagctaaaggaatttttaaatcgtcgaaacattctttgctggactggtgatgtttgtgaggatgaggctttccgaggttctcgtcaattccactgcactaaatttccctccgcagtccttgttatgtattcacctcagctatctgagcttgtagttgccgcccaactccatggatgtcttgatagttccagcatcattaccaatctaactaatgctttggctaaacatcttccttctcttgagcgtttccgttcggagagagaagcacgagaagctgctcgcgagttacgacgtcaacaagacaatgcctatcaagcgtcccttgcccgcgatcgcgagcgtcaagctttcgcgagagcagaagaagagcgtcttgcaaaggagaaagaagaaagagaaatcgttcagaaaaagaaaaaacaatatcgtgcttggcttgcttctaatcttccaccggagccatcatctgaagatgaacctgctcgtctttcgatccgttttcccgacggatctcgggctgttcgaaggtttaagaaggatgatactgttgaatccgtttacaactatgtggattatatgctttttgaaaaagaggagcctgaagaattcggtcgcgctacttcatcttctaatccggtcactccaccaagtgactataagcatgattttcattttcaactatattcttctttgcccagagctttgctgaaaccatcagtggctatttctactaacaaagccatctttccaaatggcactgtggtggtggagctggatgattgaaattaacaaaattgtttgtctttttaaatcataatgacaatttacgactatcgacgtttcgaatccgtttttaaatacatttctaagatttgatgtatgatgaatttattttctcttttctatttctactactgaattaattgttgtttatggcatgaatgtctactggacgcattgactttttattttgagcaaactttcaatgcaccctttaatctgagtacatagtcgatttccactagattttctgttctttgccaaaaaccttttctatgcatgtcatcttcatctctgttttctacgattttctttgcaatggaggacaaaggctagtaatttaggctttgtagcataaaagttttgccagctttcgtctgtgatgagtgaggtatgtattatgaacataaatttgtttaaaatataaatctttctttattgcaattcgaaaaagtctagtggctttgtttctaaacagcttaaattttacctttaaactttcattaatgttaaatttttatataattaatatacaaattagtgcattagattcactttatgtcaagcattatgaccccaagcatggaatttctcaacgtttctaacaaaattggaaaagtaaagcggtgaaattatttcctttcagactgagcaagtttattttacattcctttctgtagcgtgttttatattccatttactgctatgtcttaagtcattcaaattgaaccatataaggatacgttcgatcacgttacaatcatcgtaaaaaggagaatcgtcaagttgaacctgtactttattcttttctgggcaatagctgataatttacctggttattctagatacaaagaatgtccagtcttcaaaaacgccctggcccaggtaactctagtcaaccgacgtaagtctagcaggaacgagcagcatcatgagttttgctaactttcttaaatagtgaaagaccaagaaaagaatctatccttgatctttctagatatcaagatcaacgaattcaagccacgtttacggggggccgacaaattaccggtattctaaaaggattcgatcagttgatgaaccttgtacttgacgatgtagaggaacagcttcgcaatcctgaggatggtaaacttactggagctattagaaagttaggtcttgtagtcgttcgtggaacaactttagttttgattgctcccatggatggttctgaggagataccgaatccattcgtccaagctgaataaaaagccacaagcccttcatttgatgtttgactattgttaataaaatactacaagttaattattataccgcatgtgcatgttttgctttgaaggttcaaagacccaattcggaaaagtgtaaaagcaatatgtgtttaaaagaataaattcgattattaagatgattttctctacgcatatgtttaaattatttaatccatgtttattcccagttagcttgttatcacattgctatataatttatctagtctaaatagatatatgccattgaataaaagtatattaatgccaaaaagtttagttcttttcttccttcaaaactgaaaatgagaatttaggtaattcctgggtgctttccattgtagagagattctccccattctcttttggcaaaaccgtgaacgaaaacttgggaaaaggttcctcttctagggaaccttgtttgtcagttttttcgagcgtcatagtggcatcttgcttatgttcattcgtgccctcagcagagggtttctcgacttcaactagcgaagtcgattccgatactgagatagggcttttctcagcttgctcaaaactccgttgatcaatagcaacgttcgtcatctgaacttctggttcaattttagcagcaggtaattccggtttctgtgtagtaaaagatgcactaaacagagagcgttgttgaggtttctcctcttgaccagcaggtttattgaatgacccgaatgaaaatccagtattgggctgagatatcattgtcgaagacgaagcttgatttgaagaagacacctcactgtttttctcatcggtcacggcttcaaatctaaagacgggcttctcagaagttgaagctttgacttcggttgcatttttttgcaaatcttcgccttcattggcaacttccacttcagcagaaatccctgagccctcttcttctaaatcaacgtctatagtctcattgggcgatctggccggtttttctttattaatgatggaaaaactagttgccgaaggagttgtagtaggtgcattgaaactaaacgttgaagatacagctggagaaggcttggtggaagcagccgaaggagcattaaagctaaatattgaagaaacaggtggagaaggtttatcagtagtggctgaaggagccttaaaagaaaaaacaggagttttattttctggttcggaaagcgcagtcttctctgacagtgaagtttgttccccttctttctgcttcgcaaacgacccatgagtggaagccttttccaaaaattcaggcataaggctaggtttgtatgtttgcacattagacgacttttcaagtgtttcaaaagccgatggctcttttttttcgggctcgcttttttcggaagatggccgaatttgatcatggcgtcgacgagaggtggtaattccaggtcgtgcataaggactgatataagatgctttggaaggtgcgctttgtggagatcccgccttggcagtaatagaaggggtgtttttttctttgctatcgagtatactcaacaaactggcagcagcacgactgggtgttttctctggatgattcgcagtggtagattggtgcaatggagatgaagtaggaacgttagtaaatgatgtatcattaaagctaacatttgcggattcgtaacgggccttctttggttgaaagctcaatgaaggtgcaatggagttacttaaagagataggggtagtcgaatgtctcttatggcgtaaacgacgattataaggagtggacaaagtaggtccataatagctgagtcgctgagcaggtagaagagaattaggagaaattgtcgatagctggtcttgctcacgaagaggagagaaggtagaacggaaagcagaccactgtttagcagaattaggggtattgccgggtgtcaacgatgaagtacgagcgcgtggttcactcgaaacgccagactcacgcttcgaaattgcagcagcccttggagtttggaaacgatttaatgaagcagctggagagattacagaagaactgggagaggcacttttgttcaaaatactaatgatgccctccttttcaatctcattaagtggtgtctttcccttcttggagaaaaaattggctaacatttgattaggagattgctcaacaatggaaggagtagcttgagcagaagtgtcacggtgctcttgctcgtatttctcggttacaggtgtatttattaacatagatacgtcttccgtcgtagttgagacattttgaagatattcctcatctgtcttggaatcaaaagagtcttcgtgtttgttcacgacaggtgaactaaatatcgagattgcctttttccaagacgaaggagtcagccactctttggcacgctggaaaatcgattttgagggtgtttgagggccattactatgatttccgtctttagaagctgcaatacgatcgtaaggtgtgcgatttcgcgcggctttacccttatgtaaagttcgaataggaccagaagacatattaagaatgaattaaaacaaaacttattgtattcctattttagaggagcaaaatgctcgtttgttgggtattttgaagccaaaggtcgctttcggtcgtcaagtgaagattagttctttggaatggcaatatggaatgaaaagtcgaaggcaataacgaaagtttgataaagtttttaatcctcggatagtgatattcatatagttcgttatccggtgacaatggagaaaatgtacgaaaacacaaaatgagcgtattattgcttaaaaaaaaaacagtttattaatgagaaagttaaattattattattctagatgtatatatattaacttttgaaacacggttttacgctttgtttgccaaatgaaataatcgagtgtttcaatcaaacgacttaaattcttggaaaaggtaactttgatttacgataacaaatatatttaaaaatttttaatattgaacaatttactttttcgtttactctattttgccgtaagccaaagggtttatagatacatttcactccccatcaatgatttatataacgaagcaacaaaagctttacaagtaaaatacaaattccaaaaaaaaaaaaaaaaaaaaaaggagtaatgtaaatattctatcatggcagtagtttcattgcattaaaaaaaaacgcttttgcaaaatatgaacactgtaaaatgaaataatcaatcataaacttgaagatgaatttttaaaaaaaaatcaaaattataaaaaaaagttaaaaaaaatagctaaagacactacagatcttacaatctttgtgcgtctattttatatactatcaaaataacaaaatattaataaactcaaatataatttgccgcatattcataacaggcgatgtagtacaataaaacagttcgaaaatattgagaagatttttttttataatcaattcatgaaaatgccaaagcttcaaatatcaactcaaagaatggttattatgctgtcaacatcgactttctccgagtctataaacgaagcgaacgagttacaatttatcttcgtaattgaagattaaattatgtattaattctgtagaagttcagattccataaccttaatctcaggtagaagtcgtacttttacttgtatgtgcacgaattggaacaacattaacagtcttcattttttcgcatattgctctacactattaaaaccgtcttaaaattgaagacgatgttagaaaaattatttagccatcattaggaaataattaaattaaaacatttgaggactcatagtttcttgactttatgatgaatttgcaatttatttaattaaggacacttaaatttacaagctgagtatttataaaacaatattataaagagtcataaaaagaagagtgattatataaatcaataactgagacaagaacaaacattcgcaggaaacatttactacaatattattatttagcttggagcacttgtcatgatgatatagcgtatctttagaaacttgtacgaactgcacaaacctggtttttcatgtatgctgtaatacatcgttgaagtccgtaaattgctttaaaccatgctgcggcgaataacattatatacaatataaccgtatacaagtataagagttaactaatgattatatatattttgttacaaagttatgcattgcataatattataattaaatatggaatagttacaactaaacgaacgaaacatgacttcgaaatttactacagctgcacttaatttaataaaagattttttttaattttggaacgataattttatatttgctgcggaaattgcgaattatagaaaacataaatagtagagataattaacgtattgtaacgaaacaagagattgctgacatgttaaatatacataacaagccataaagattccataagccaattaacgcgatttgcggtcacaacactaagcatagctcaccattcgtttatatgactcaattgtcaacaaaactcttaagataatcattgtaaagaatttaggactttacaattccggcttttcttactaatgagtaaaaagaagcctatagttcaatgtaagtgaaatattctcttttaattgtgagctaatgaagtgctgtttagattatgatccttttgacttatggccctcaatagctacggacattgagagtaagattccccttcgcaatttgcaatgggttgaatcatatcagtataagaagcacactattacaagcttagatcttgaatttttgccttggttagaggaattttcgtctcaagacacctcaaaggatcctacgttactgaatattcctttagtaaacatgctttttcttccagagcaggtaagtacagtaaggaaagttgaccttgtaacctaccatcagcttccatagttattctgattgacacgcactaacattgtaaaaaaaggacggtgaaatatacaaaacacagcataagccattggctacaaaatggttccaaaaagtttcgaaaaacgaaaatcaatcttggatgattgtacttgttgctgaagctcagcaagcaaaacgctccaacagtttgcgtcgcactcattctcgatctagttcttatttcgctgtaaaatcgaccattgatagggttcgcggagattttaatactggaaatattaatcattgcgtacgactagactatgttcgatttgggacccccgatgctgaaggttggaacgagttcctcaaatgtcttgagtgggccgtcctcagttcattggatagcagatttttacagctttctgaacaaataaggtcgataaagttgtttgatagctctatattctctgattacctattgttttttcttcaaaaggaaaggctggccgctagcttttttgaccttgtgttatatcgggaatcactagaacaatgcgaagacatgttttcaacgctttctaaaataataagtgccatagatggaaaaaaagagaacatttccaaatacttgggagagggttcagatgctcagccagaccttaaggatttcaattcttcctttctcatattaggatcacgatacaataccctccacaatcttttagcagatggcgattttacattatttcatttcactttatttcttttgtcaaaaataatcttactgaatctaaaaatatccgactacgagaaagcattttcaacccttcaacaggccttactatttttaacctcgtccttctttaatgaattcgtccaaaataatttggaaataatcgctgcatttaattatgattgttatactcttctgtttaagaaaattactgaagctatccacaacaatgataccccaatcccattgtgttgtgcaaaaattttactgtacgctcgtcgccagttaacaaggatggcaagatggaacaacctgattgatgattcttcgcctctcctttggcgtgagcctagttttccattgattgagcatcacgacaatagcttattagacaatcgctttcaaaagctttcggagactatctcttcgaccagttcgtttctatcagagtattacaggctatcttctgaggctttaagtatttttaaagcttataagaatcgctattctttcgttaatacagcttgcgatactggattggcacaatacctactagaagactatgaaaacgcttatgcttcgttaaaaaatgtggacgttcaaactgcatggtcaaatgatcctttggaagaaaaatggtccaaattttacgtagacttacttgaaaaacttgaaaagtttgacgaagctttggaatttgcttcagctatttctaaagggaaggtatcaatatataacaaaaacaagatattggagctttcgaaaaagacagctaaatcaaaggtttggaatctggatgatttttttacaatagaaataccacatatgatggccgtggtgccccacgatgatggaattaacttgagctttatgtgcgagtcaaaagtttttgacctcgaaagcgttgattcagttacatgtaattatgttctttcttcgagtaagaatccaatgaatctactatttacgctgcataatagtataacggacggaaaacttaacgtgcactgtaatgtaagtgatcccaccttttatatgtttattaacaatggaaataggatattattcctggaagatatcatttgaagacaatagtttttaaactcaaagacagtgtgctatcatttcaaaaagattgcttgcattctaacaaacaaattgaagtattgaatcctaccaagcatagtaaccatctgtatatacttcaatcaaaaatttcgcagcagtttcagaatgatggaatatttgcttgtatacctattatgtttggtgaacgattttacaaagcaagttgctcagagataaaactatcttatatagagaatagcggttttacaaatttggaaaagtctttccttagtgaagaatcgcattgtggccttgaatcaaaaactgattccttggtgataaaaaacatccaaaaagttccaggagtagccaagttgtatatacccctaacaaatacaccagttgaaggaaatgaagtatgtaaaaaaaaatatttcactattgctaaccttatttagtttcttattaacttgagctacatcttagagtctgggcagacagttcgatttggtaaagtattacatattgaaaatgctgggattgttgaagcaaattgcgaaaaaacaaataatatgagggatccccttacgagtacaatatttttacatatccaaccaaaggagcccatcattttctgttcatggaattgcatgcgcaaaaccaagcaaggtacatatgataatgtttttgatataccttacaacattcctgtcttatcccctatggattgctttacgagctgccattttgattcggatatgtcaatagatttgaagttttccatgaattgtctacgtcttgcagatgtcgtatttatgaaattatgtgtaaacatatgggaacggttcgatttcattgacatcgaacatatcatgccgttattagaccacgcttgtcaacagatttctttatcaaacattacccaaggtacggtagtactgcctgaagagattcggaaacttaatggcaagaaaattttaaactcattttttgataatgaggagcttcggaatgaatttagtgaatttattcagcatttagagagcgaagtatcctttaatagtctcagatcgttcgttcaagagtttgaaaagaaggaacgattaaaaaacttacccttctatttttcattgcatcaaacaattggacctttacccttcaaagatgaaatgcaaagtaccactatcgagtatatatggaagattccccagaaggttttgttgaataaacctaccgaaattacactcacattccttagatctttgacacattcaaagaaagagaaacagggacagtccttcgagatattttacaattttccagcttatactacaacaatcttgtttgctggacctactcaacgaaagattgtatgggaaaaaaatcaaactacagcacaggaacaagttacggcggtgtttcttacggctgggagagtaatgctaccagaagtagttgttcattcaaaagacgatgatatttccatattgaagaatacaaagtacactctagtcgggcgtcctttgaacgatcaaccggatctagattatgcaccttaatatgaatttagtacggtaatagaaaaacaggtatttttcctttcgagattttttctagcgcaagcgcctggcttcacgctcagattctaacaagacgagaatatcatcttcacgaacaggacccttgacgttacgaataatggaacgggatgtgtcatccatgaattcgacacggacttgagtaacaccaccactgtatcaatattagtttttaattcgaatatctatcactttgttacataccgagatccagtacgtccgagaactttgatgactttagccaacttaactgggacctttgaagaatccatgttgttagaccaagaagtctttcaaaatgaagttttgttgtgttcaaaaatgacagtcacgatatattttagcaccttgcttcgtaatgcactatctatagtattttgccatttctctcaaataacgatgtgtctaatcattaataacctacgttgtcgttgttgttcgttaaatctatctgttatgagaatgcctcagttacgaagtgtaatatatagaagtttgctggttaattagctctccggtccttcctacatttatgttaatttcaattattgtgtgaacatttatattttagttgttcagtagaaaaaaaaaattgattaatgtgaacatgcaaataacgtaagtaaatggtaaataaaagcaagcttccgcttgccagcaaacgaaagatattgctttgaatagtcataaaactgatagagtgttgacagttattattcaaacgaatcaagtatgagaggtatattcactgctgtcaaaggttcaattgactttgatatgcgcaacacttgaaggaaatcactcattaaagcaatgtcatcgcttgcgttaatgaagctggcagacgcttgctcaagttccgaggccttctcttcggccgcatcaattaccttctcaggtaagccggccatactagcaacattcataccgtaagacttagggcaaataccatcttccagcttatacaaaaacgttacacgtctgattttttcatcaacagctgcagccatctgcatcaatcgtacttgtcgatgatgcataaaatcaacgcaaagactttgataatgtgtagaaaaaaatcccaaacacccaatattagaaaccaaatgatgaagtacagcgtaagctatcgcgtgaccatcataagtactagttccacgacctagttcatctaaaattaccaaacttttaggtccacattcgtccaaaattttctttgtctccgaaagttcaaccataaaagtacttcgtgccgacattatatcatcattggcacctaatctagtgtaaatgctggtcataggtgttatactagcacgtttagccggaacccagcaccctagttgagccattataacagcaatacagacttgacgcaataatgtggactttccagccatgtttggaccggtcaaaacaatcatgtttggggattcacctcctaaaacgacatcattaggaacgaaagttgaagccgcacttgcgtttatacaaggatgtctcaactcctcaaaatacaagtgtccgtccttctgttcaataatttccggtctacaatatggctcacccaacgctgcggctgcttgactaaggctgaaaaagcaatcaatagatgcagtatatttaattaaagccaaccattgctcataattagaatcgaatcgaatataaaatttctcctgcattcgcgacataattgctaaatgaagctcttccgcctctagtaatttctttattttctttcgtagttcatcattatagtatcgattggtttttttggtacctgacattttgcaccaattaaccggtactttaacatcgcttgggacttcgacctgataaacctctttaccaatatttttaaaattaagagacgagcaccttagctgcttcttgtattgctctaaaagcgcatacaattcgtttttaagttcggactggtatttttgagaagtatcatattcggcttcaaagccaatctctggttcgaaaacaccttcttctgaagccttttgccaattgaaagctcgggtccatgcttctaattcctctttcatgttaggtgcactttgaattatctctcctagtaaagttccttcagcgacttccatgaattcctcgcgaagctgatcaaatgcactatttattcgttggaatccttctaatactcgaacaaaatctgcgggtttacttcttccggcatgcacccgtgatatcaaccgttccaagtcaggaagtttatgtagaaacccccaaatggtatctcgaataacagggttgtcggctattaactcaacaacatcaagtcgtgcatttattgcagtaccggaccttagaggatgacaaagccatgtatgaaataaacgtttaccaaaaggggtgacacatctgcagagcaaatgaaacaaagtgccttccgatccaccatcaaaagagttagagaatatttctaaattttttaaagtctgcccattcataagtagggaagttgactgctgagaagcgtcatattcgtcaaaattacccatggaacacatgtccttatccaactttaattgtcgtaaataccaaaataaagcaccaaatgcactgatggctagaggcttttcactaagatacgactttagtatctttggagcaccttctaaaccatttttgaaatagtctcctgctataatttctctctcgactcgttcgttatcccaaaattccgtatacggcttgataaaattccagattgaagatgaagacacacagtattttatcgctctaatcgatttttgagaaatttttgatttctcaaggatgagttccttagggcgaacttgcgttaataaagtgtcaagcttagttctgtggatatcatcagtgaattcacacatatgaaaaccaccagtcgaggtatcaatgaagcagataccaaaagaaggctcttcgttgtcagattgaagactttctttaatagccatacaatatgttgacaagtcagaagtcagcattgcctcgtcaacaagggtcccgctcgttaagacttgggtaaggcctcgctgaactactttttcttccttctgagttcgttgacgatcttttatttctttacctaaagcggtttccaattggtcgactcgagctatacgatacccctttgcaatgaattgagatgcccagtaatcaaaacttgcttcaggaattccaaccatcttcatattaactctatcagttaactttaaggaaaatacctgatgtccgatagcggcatcattctcatataactcataaaattttcccttctgaaaaaaaacaactgtatccataaggtcctttttaattttccaaaattgtttctcaaatggcttgaaagttgcccaagctgaaggtgggatatacaatgtgcgcggatcataattaggatcacccactcgattttgatcagcatctcgaacatctagcaaccactcgtaacgttcgttgttttcttttttaaatgcctccattctttgccttcttttttcttctctgttcaggacaccgtttttattcgattttgtgggagatgcagaacccgagaccgaagggcttggactggcaatttgagagcctagccgataactttcatacaaagaattggaactctcctttcgagattcctttttgggaattggagcagccacagaaacggaatgatctgaatatccatcaacatcctcatccatagattcgacttcatcaataggcaaggatgcctcagatgaggcttccgaaatatgatcgggctcaacgtagtcatccgattcgtcatcagaaacgattcttttatgacgagatcctttggtaggtgcatcgtcgaagtcttcgtcttcatcactttcagcgtaggaaacaggctagcatattgttagtcataattaattaaaacaaaaatctggttaatataggggtaaagtgcgtatttccccttttattcttctaaagtaatatgtatcactcaattacccataccttccttgaacgccgagaagctataaaaggcttgtcgacttcagataattccgaattttccagcttcgacgagacaggatgacgaaattgatcttcagcttgaaatattgatgtatccaaacttttaaaacttttctttttcgtcggagaatcgatttcttcttcagagtcgggctcttgcttcacagacgtgcgaagcaatttacctggtgactcctcgcccaaagaatcatgagggcgtttaggagatgatcggtgtaggctgctagaaagcggtgaggaaaatggatcacttgatggaggaggaagcatagatgaactggaatctatctcggtattcgcatgatgagaaggactcgttggcaattcgcgttccggagacgaagagtttttgttcacattggagctgttgtcaacatcagcaggcgtatcatgattagagtcgtgattcgaactactagataatgtagaatccgacttctcttgtttcacattcgggattttggagaaaaacccaaagagggttttctgctttgttttagctgatgaatcttttgttttctccctttgcttgccaacgttcccaacgctcatactggaacaagtgttggttttggctaagttcagttatttacaaaaagcagcattctaatagtaaacaaagctaacatgagagcacaaaataacatatataatttccattatttttagttttacaagaaattaaattgaagctttatgtatttacatctgtaaaaatagcgtgtttttcaaaatcgcatttagctacaccagcgctctttccttctttaccgtaatctatatccactaccaccgtctcactacaccatactttgaccaacacagtaaggtggtagtataaagaactagaacgatggaagagtacgaaacagacattaagcaaattctcggtacagttgatcgccaaactgtatctgcgaagcaagttcgtcaacttttagaagaaagaagaaaggtagatttgagtgcgcataaaaaagacttgaatgcgctgattttgaaatgctttgatgaaaccgccgcaccttcagagaaggagagtttaggtaagatgagaatattgctggaagaaatttgcaaataataatgcaagaaataataattaaccaaacttgtagaaaaacaagcacccgctcgcaaaaccaagggtaagagagcgacggaaaatggcactgaagaaggcaagaaaccagcaaagagaacccgaaaacgcaaggaagatggagaagagggtggaaaacgcaagaggaaccaagatcctgccaacaatcctctgaataagcctatgaagttgtcccctaagttggccgaatttttgggtcttgaacaggtaaggcggtgttgtagtgtggaagccgtgcctactcgttccattcaaaatcttgttgttttgaaaaaagaggcaggcttacatactaaatgtttatttgcacgctttctctgctgattgctaactaacgtagttatctcgtccccaaactgtgaagaagttatgggagtatataaaagcacatgacttacaagatcccaacgacaagcgaacaattctttgtgatgacaaattgaaaagcgttttcgaagtcgacactttgcatatgtttaccatgaacaaggtaagttaatcatggatgggttcacaattgttttaaggaggtttgtcaacaaacttttactttgtcgattgtaactttccttgtctacttttttcatttggttacttgtggaaaacattccgcattgctctttgttacctgctgccgaagctaagctaacttaattaatagtacttaacaaatctcatgacgaagattcctgatgatcaattgcccaaacctcagcctaaaaatgaagaaccagcggctccgaacgatcttcccaagcaggaggaaaaagagttggtcgagcctcctaccgccgaatccaccgcttgagcctttgtgtttgctgcatgaccatataaaacagccaaaactttttttcatataatatcttgcaataatcccttttttttttgtctccaaaaatcattcaagttttttgctttcattgcatgcaataaatgtttatttcgttcaatactcgcttgcttacctgtttttcctcaacagattttgcctatgtccatgtcatatccgtgctttaatactagaggctatgtatgtctagagagtctccacgcataatcagatatcgtattttgcattacaactttctgatcttaaatgcagtgtgaaaacaaaagttcaggttgctgactttagaccttgggttgctacaagaggtaatttacgttagactgactgtgattttacgaatatttcttatcacctattccttatggatatctttgtgcttttttttataaattcatatagcatattgattttcttttctaaatgaactgttgtgcatgatggagattttcatgtattgtattaacactttcttcaccgcacctttaattattttaccgctgctttgctctataatatcattgaaataaaaaatgattcacttcagcccattgtcggggaattttgtttacgaaaccaccgtcgcttggagctgtcgaagccatatcatcaataataaattttatttactacccttgcgtattacaaacccataatatgatgtttgctttacagttttggatgatctaagatatggcttggttgtatgactagtactcgtcttgtgtctatagtgtatatattaaattatacgcaaatggatgttttctggatatatgcttttaagtctcaaataatgtactgtctttttaatttgtttattattttattttgggattttctttggggttgcaaacctgtcatccgtttgttagagtatgtttacataaacatttttgtgtgcttgtgggtcgttttttttttggaagattgctgcttataaccgtcaaaagacttataaattgattagactgagtggaaagtgttcttctcttttatattagtccttaatgaatatacttattattgattgaatcatttcatggtgtttacgacttctaaagatccaatcacactttagatgaagccacatttaacagttgtaacaattgcatttatttgtagacaggacaacgcttgcttacatacatacacgacttcttgtttaagcacaaagtaaaaagattatggcgaaaaagttaggggaatatttttttcaaaacaaattagtaaattatataagccctttataagagattgctatttacttccgctgtacattcaatgctatatacgtttctaacaaaatattcgatgcacgtttcaaaaatcaattcagaagcttaaaaactttccaataatgttgaaattataaatatattcttagtttgcgatattccagctaattcagaggtctccagctaaactgttttttttagcatacagcagctcgctttacgaaattttatttacccagcgccatacacgcaatcttctataaacaatcaaaatgtcgccttcgggccccaatttaaataataaggagcacaacagagcatcggaaaaaaagaattctaggactcataataaaaaaactaataggaatcgtacgtaacttccttgttgacatattccttttaacacatttcaagaaagtaaagagaaaccggtaagctctaggtcggtagaaactccaaaaaatgcagtttgcttagagccggttggcacagatcctgtcagtaatgtcgctactgttgatgcttccaaagaagaacaggatgaggatgagcaaatttgcttcatttgtgctgaaggtattacttacagctgcgtccttccttgcaatcatcgtatgtcttgtatcatgttttaaaaatgttacaactatgtttaatctaacttaattaggaatgtgtcatgtttgtgctttgagattgcgagcgctatacaaaacgaaggaatgtacgttttgtaaaaccgaatgggatacggttctcattactaaagatcatgaaatcgatattcatgatgtcgatttagcaaaacttcctttccaagatgagaaacttggaattgtgtattctgacgagcatgctcaagaagaatccaacctcttgcttcaattcaactgtccagaagacgcttgcgatatcacatgcaaaggctggtttgatttaaagctgcatgcgaaggtcaaacaccataagtttttctgtgatctttgtgttaagaacaaaaaggtttttacccatgaacacacgctattttccaagaaaggattgacaaagcacaatgaagttggagatcagggatccgatttagagattactggattcaagggtcacccgaagtgtgagttttgtaatacccatttttatgatgatgatgagttgtttaagcattgccgtgaaaaacatgaacgatgttacatctgtgaccaagttgcaggaaggccgacgcatcagtactttaaaaattatgattcgttagagcgccactttgaaaaagatcattatatttgtcgtgaaagggagtgtttggaacgtaaatttgttgtttttggaactgaaatagatttgaaagcgcatcagttggatgagcatccccacaactttactcaacgcgaacttcgagaagcacgaagaattattcctcaatttagttacgacccacccggcgcgtccggcaggaaccgtcgtgaacgaacttcttccacaccatccgaacaatctacttcagtgaatgagactgccaactcactctctaacctacacctttcccgtggagagattgctcacttacgacaagaagaatatgttcgcgagcaacaagctcgccatcgtgattttggtttcacgttatcaaatccggcgcctacatctgcccgcccagcgacatctactagaaccatcagcagaggaaaaactagaacgttaagaaacgaagatttcccctctttagccgaggttgctaatcaaaatagctcttccgcaccctcagtacctgtctccgcgcctcgtctgtctggtaagtctgcttcaagaaatcatgttccatctccacccaagggcactaaatccccgatggcctcttccgagcaagcacaacaccaacaagtaattgatcggatgcaaaaattgacgaattacgatgatcacaaaattaatgactttaaatttgctgtttcttccttccgtggtaatgttatgcccgctcgtgaagctgttgctcgcattacaaaattagttgcaaagcctcatgagcaattgtcgggcgtgttcaaccaaatagcaaatcttctagaaaataaagagaagtcaagggaattgttggaagcttggcaggaatggaaaatactgaatgcgaaagatgatactcgtataggtactactaactctaatcttttgcgcttgaagagatcaaataggactgctgctcaaacagctagtgtttggaatcgtattgagcgtgcagcagctcacgatgggccttctttgtctgctccatcatcttctataaacctagcaaatattacctcaaggccaacgaacagctcagctgcaaatactccttcttggggtgtgcgcaaagcacgtgcatctgcgttaaatgcaagatctgaagaagattttcccgcacttcctccttctacctcgaagagaatttctgttcaactcggaaaaaagcaggctcgtcccgttgattcatgggggtctacaccaaatacttcttccaatcgtaatagtaatacgatgggtgtttcaaagaaaaaaaacggaaaaaagcaaactgttttgtttcacattggttgattttggtttattgtatataataattttattgatggatgggcatttcgttaatatataataattttgggatgtactcatttataatctagcactttataccttttacctgactgttgggttgtttatctgacctcataaaagaaagtgtcgttttggaaaaattagcattacattgagggtcctccgctaatgctcctgcgaaaaatgattttaattttggatgttttttcagaaataaaatgaaaattagcttgatataatatcaaccggcagcgagtaatagatttaaaataaatttgattaattaaaaaaatttgttgttttaagcaagccattttgctaaaatcaaaggtaatggaagagtatttccgaaaaatctcaacacatgtgaatgatcagaaaattatcgccataaaagacagaataagtcatcagcggttgtttcatttcctatattttttttttatttttttattttttaataagggaaaatttaacgtctaaggatacagaagattgttagcacattaaagtaataaaggcttaagtagtaagtgccttagcatgttattgtatttcaaaggacataatctaaaataataacaatatcatttctcacaagttattcaattttcttttttttttctaataatatcaagaatgtattatttgtttgacataagtcaactaatttatttaatatgctggattaatcttgcagacatgtaaattaacaagttttagtcaaataacgttgaagtttcaatgaactcaaataatttctctttttttttatataaccatatgtctaatctgatttatattttccgcagggatcaactgaagttatgacatttggattggatcacttataaccttggtcgccaaataatacaaaaatcagcgttataaaacaaagaaggtttttgttaagaaattaatcctctttcttgataagaaagttgaaccgaaattgcagatactgatatatgaaaataatacccacaattttgggaatagcgcaagcctcaatttaaacaataggtgaggacacatgataatgacctcaatgattgttagaagaaaagagcctcattacaaaatcgaaaaatgaatggttgggtacaagtttccaaaacatggtaaagtggactttgcgtatgagacgtaaatagaaaaaaacacttgttatatgttttctagaattattgttgtctctttatggttggatgatgcaaaatagtaatttcggttagttgctgtaaaacaccacgagacaaatagatatggatatttattaaatcaggaaaaacgtaactctcggctactggatggttcagtcacccaacgattactggggagagaaaacagggcaaaagcaaagcttaaaggaatccgattgtcattcggcaatgtgcagcgaaactaaaaaccggataatggacctgttaatcgaaacattgaagatatataaaggaagaggaatcctggcatatcatcaattgaataagttgaattaattatttcaatctcattctcactttctgacttatagtcgctttgttaaatcatgtctactaacaagatcactttcctcacaaactgggaggccactccttaccatttgcccatctttcttgctcaaactcgcggatactatgagcgtgaagggattgaggttgctattctcgagcctaccaacccttccgacgttacagcattgattggttctggtaaggttgacatgggattaaaggccatgatccatactttagctgctaaggctcgcggataccctgtcaccagttttggatctttgttaaatgagcctttcactggcttaattactttgaagggtaatggcatcaacgacttcaaggacattaaaggaaagcgtattggctacgttggtgagtttggaaagatccaactcgatgacttgtgcagcaagttcggtttgtctccttctgattatactgctattcgctgtggtatgaacattgcccctgccatcatcaatggtgaaatcgatggcggcattggcattgaatgcatgcaacaagtcgagcttgagcgctggtgcgtctcccaaggccgcccaaggtctgatgtccaaatgttgcgtattgatcgattagccaacttaggttgctgctgtttctgtaccattttgtatattgcacatgatgaattcattgctaaacatcccgacaagatcaaggccttcttacgtgctatccattctgctactttggatatgcttaaagatcctgtccaaacctacaaggagtacattcacttcaagcgtgaaatgggatccgaacttcatcgggaacaatttgaacgttgctttgcatatttctcacatgacatctctaacgtccccagagattggaacaaggttaccaattattccaagcgtttgggcatcatcccccaagattttgagcccaactgtactaacggttacttgacctgggaacttgaccccgatgagaaggatcccatgggcaaacaagaagccattgccgagatccaagatgaaattaagcaaaagggaggtgtcttcagcggcaactcacttcgttatgtcgagcctgccaacctttaaaaggaatgtctcccttgccagtactgctagggtttttctttcaaactatggaagcccattcaagctgcatattacgattttgtttttcgcttttagaaagtggtttagatgagataatagaaaaattcttgatctccgacaacgagtacttttattttttttgctaatcactttactcaatattagctcgaaatcgtagaaacgtagacgggtgcgggataccgagtggtgtagttaagaatttttataaaccacgtggcccaaaaatatgaacccaaaacgtttatacatgagtatactttaagaaggctataccccttcgtgttagatgtagttttagctacccaacccgagtctatgagcttgacttcagatgtagaaggcattaaatcgttttgaatattaattaaaaaacgatgaaaattaaatatttaaaagcaatcatacgctgaaaatttagtgctgtggctaatccttcaacatggaaatgccataaaagtgactttgacaaaaaaaaaagtatatacaggtagtaaactcatctacttcattgactttgtttacagcatgtggaaggaggaatatttattgctaaatcgtagtttaacattcaataagtaatactattgaaattcgacaagattggccgcatggatgaaaaagaggcattttgctttgggagaattagttcaaattagaactgaaaaaaaaaactttacgaggcaaaaatgtcggattgagatcgtaaaagttcgctcgtcgtcttttgctttgtgattgttttcatggatacatcttgctggatatttaaattttagtactatgtataagatattctataaatgttttatcacccaaacctgttagcgccttcttaattctattcaatctggcttttgctctgagactacttcttggactttcactacttgttagttatacggaatttgtgtaattagaagtgaaataatcctttctattagtaatgcaaacaaaaatcaattggaaagcaaatttacacatacttgctgtatcgccttcgactatcttttcattgcataccatgattttagacgtttatacttaagcaattaaaaggttttgattcaatcataaacataattatccttgataaaaaaagaattatacacattgttctctttatttgacttcgaactgtttaacatcgaaacggtcagatgatacacccattcctccaatgtaatccctggcttcttgggcaagcttgtcagttgtcgcatcatcccaaccaaattcttctttcatgacatgtgtaacaccagcaacggcttgaagagcttgtctagcatccaaaaatgccaaacgggtcctacgggctaagaaatcggtgggtgttctagtgtattcgtactttatcgaatactttaattctgcaacagtaaacggttcatcaaaggatgcataggaaacgcttttatcactcgaggcatcagaagatggagcgaatacttccttgtcagccaacgtaacaggcagcttgttgaaatcggttttcgaatataactccaaaattaatggggcccgagatccatagttgtgggacagatgctttgcgagtcttaagggaatatgatattcatgaatcaatctggcagaataattcttataatagttttcaccacccaccaaaatgagttttttagtttgacagggcttcaatgcctttccgaagtcgtggtccttgattagttcattaacagtctcctccgccatttcacggtatgtcgtccattttccacccgagattgtaagtaatccggtatcagacttgaaaatgaagtgagaacgaactagaccctgcgtctctccagtagtgggatcggtgccaggagggaccgtggatgggtcacgaaccaaaggtcggataccgcaccatgcagacaagacatcctctcgatcaacagggaacacaaggtatttttgtagctccttcaatatcaactggatatcgtcttcagatggtgtgggattagtgggaacactactcaaaggcttatctgtggtaccggctataactttaccctgccatggtaagaagaacatgacacgattatctgaagttgaagggtcgagaattcctatattgggaggacagtagtattcgggcaagacgacatgaacgccggcagaagggacaaccattctaggaaactgggcagtcttgggtggctcaccttggggatcagcatccatttctaagattttgtcagaaaagggaccggtagcattgacaacagaagtggctttaatttgatattctttaccggtttcacggtcgatggcaagtacaccttcaagtttgttgtcttttgattttaatagttttttaacctccatataattcaaaacggttgcaccattgtcaattgcagtaactgctagcgtggtgttcatgcgagtgtcattaaaggagccatcatggtagacgcatgaagccttgagattagaatcgtcgagcatgggagcaatggccacagttgtctcttttgagaaaatggtagaagctctcaagttcttagaaccagcaacccagtcgtaaattttacaaccaacaaagaaatatggaacctgccaccatttgtatacagggatcatgatgggcaacactgtgcacaaatgtggggccgttctcaacatatttgcacgctcatttaaagcctcgataaccaaatctaattgagccttagacaattggaatacagctttctctagataacgcacaccaccatgagccattttagtcgactttgatgaagtctcactggcaaaatcagttttttctaacaaacaaacattaagtcctctggtgctggcatcgacagcaacacctgtaccggtagcacctccaccgataatgaggacatcgaattttgatatatcttcgacgttttttaaaagcgtttcacgagatggcggaggggctaacgatttggtaaacggggtaaattggggattgaagtgagaaggagcgggtcttttaatgaaatcagagtagaaaacggcgcctccaactagacccgaagcagccaaagcggcctgaacagatcggcgtttgaagattgaaaacatctggtcgatggctagattaagggagaaaaataaaacgtgaaatgataaatgagagaaatagaaatattggtaaagaagaaagaaaacggcaaaaatattactagaaaggagaatgagagaagggagaggggaaataaatctgtattatgcgaatgttttagttttttatttcccttatatgtgagtactatagtgcagcacggcttatgtatgtagaaggaattgtatataaaagggaagggagatggatgattttatgagaaaaggaagaaacagggagtagtttgcttatttgtcaattgtttttgtgtttttttttatcttttaaacgacccgctttgaagttacagcaacaattttagagctattttttcataaaggggtttttctttatatggcgctttgtcgatcaactcagcaagcaaggcggaagaagaatacaaaacaaacctaaacaaagtaaaattgaacaaatatattttcagtaaaaccactagcaaaatcaaattcccttaacgaaatgaatttatcaggcagatcaatcaaatcgctaccagagctttatggggaaatttaaacaagatgcaagatgcagcccatgcgaagaaggatatcgcagcgacctacttctatgcaaagacgcaaatatatagaaaaaaaaaactttcaaagacatgtcaacagtgacgttgggtttgtttctactgcaagtcttgaacaaacgaagcttcaataacgaagcaatgccatcacggaaccccacacttacccctacacaatacccgagtcatgacgcggcctggaaaggtactttggagaatgtattttagcttgaaaaaaacgtttttcaatgcttctccttgtgtttcatggacgctggaaaaaggcgatccacgaaaaaaatttttcatttaagaatttaccttcgtttaagctataaaccaggaactgtggggccagatgcatggtgctaaccgagtgacatcatacggctacttgaggcaggtttcaatgatgtgccgatgcgtgaaaatttgtggggatgggaagaagcgtttcgagtgacattttagcaagttattatgagatttaagagtgtaatagatctctataacacatgcaaaatgcaaatgattttcctgagtcgccctgtaacgtgttgaagggttatctttcatttgttgcgcaacgatcttccttgtttgggtattcacctacagtaaaaattttacctgattaaaatatagagataactcttctgaaaactttgtgatttctttccctctttttctttcttttcattaaaaaacagacaaatttgtttgagaaacctacatccataatcgatttccttatatatcgatattaatattgttatacctgttttatagtaatacaaagatagtgctacataggtaaagtatattatacatactaaattcatttattcagtcgtattatactaatacaattttttcgagcattttaggattcttcaattaaaggataaattaataagaattttttttattttttgaataaataaagaagggaggatcaggaaagcttgaatttacgaatcaaacatttatttttttaaaacagacattatttatactaaaattcaatgtgcctctacagaaacaatgtaaaaaaaaagataaaaaaaaaattaaataaaaatgaaaatgagtaaaccaaacataaataaataaataacatactttagaaagtaataacaatctatcgcaatcacatgtttcaaaaactgtagatgtagggcaatcagccttgacgatctttatgtttttccattcattatgcttttaaatcttaggaaatcaagaaacctaaaaaccgttatattagtgaaagctgttatattagggattataaatacctaacgtacaattgacctttacaaattttgttccacagattctaaggaatctattatttaaaagtactatatatatacctaatgagactgttgtctcaactagctcacatggtccagtggttaagactcatcgttgtggccgatgcgacccaggttcgattcctggtgtgggcagtttttgttatttttgtattttttgctgctgatttatttaccatagaaatgtagtgctaattgaaatcaaatttaaaatgtattatgctttttagaaatttctgcttggttgctcatacacaataattatacaaccttttatttacatctcttcaatggcatagttcgctttccaatatttttactatcttcatatgagttttttttttactatacttttatttttcttctgatactcattttcgtcgttcactcaaaagaatgttccattaaatactgacaacacattatacgatctttccatagttgctctgcgcaaatgaaaacataagacccatcagatataccctttaccttttctttgcattcttcagcctcacataaaagctcttgcaaaactttctttaaataatcttccacatcctgacgatcccttgaaccatcgctaaacccgttgatgtactgtaaaacacgccgagtttgatcataactagcatcgtttaacttttccgaaggacttactaatagagtacgcactcctaccaacgttcgaaaggaagctccgtgcaatgagcatgtataatcattccaatagccgtggtcttgtaaaaatgattgttgccatttatcaaactcaataaaacgatccaattgaatagaaatattagggttgttagataaacaaaaaccgtattcagtaaatagtttatcgtttccgtgtggcccatagcaaaggaatatttgctcacctttatctattcttcgagtcgatttgatagtgattgtaccacgtgtattaattaaagctgtttgagcttcaggagaatggttaaaatattcaaaaataggtgctaatgtcaaatgatcttctgtattcttgctacctgtatcgtagtataggcaccttgtatttacacatagccatccccattgaaatgtcggctggtccacgcttacaaattttttcacttgttcgtaatcaaacgccattacattttttctttctaggagcgaatttcgaacttcatcaggaagaatagaccataaaggatgatcagaagtcaacgttaccggatgaaaggaaaatccttgtggtaatgctttagtgtaataaggagatatttccaaattcgaatgaacgtcttcacttattaaccaagacaaaaactgaaacgaagtcaatttatcgcgaaaggagtaccgactgcaagttcgtttattgattagtatatttggtggtaactttaacaaaacggtattttcctaatatagttaatactaccagcacagcttttaactgacccttcaagtttcgttgaagagttatagtcatcaattttaaataaacgtacatttatatcattgttagcaagcacgcaacttcctgcatctggaataacagaaaattctaatgaaggatgtacaaatgctcctttagatttcacccatgaaacctctgactctatattttgtttattactcatctggaaatagacccaacaacttaatgacctcgtttttgttgtagttgaagcgtgtatcgttctagagtatacaccaatttttgacgcttcgcaataattgctttcaattgttctgaactctccgtggttactgaaaaggcgctggtggcaggtcgattttttagcatatccaaccgagcttcctgaagctcgtattttgttttaagcgaatcctcttgtctctgtaagcttgaaatagagtcttccaatcgttgaaatgcctttgacaaaatgggtttcactatttcttcgaatttagcttggcgtgcgctgagttcgtcttcagaaataagattaaaatgtctttgaacctttaaaatatgcttaatccggggaaagtcgtgaattcccgactctagtgtatcgatgcttgatgaaagctaccatcacgttaacaacgacaaaatttgtgcgtcctcagctacttactgttccaatactaatttgtaaagaatcaacgcattgctgcaatctaataatcattagtaacagataatggtaacattgtttacccatccaaatacgacatatgtatcgtttgggtagttggtaaataaagcaccaactcgtgctgaagtacaaccaaattgatgcaacgttagctaatattgatttattgtatttataaatttatgaagaaaaaaagcacaagtatgaagtttttttttgctatctcattgatttgcttggttctgttattatgcgatattcagcattgaaggaaatgaataccaaaaggggtaaaaaaatatcgtaaaagaagatattatttttgaggtaaatattcgatcaataaattatgcaattgtttaataagttttaaaacaaacacctgtgtaaactacacaatccttcggacaaagtataatggtatggtcaacttgattgatgctttatttaataataaaatctaactactcttcttcaacattaatgatagacgactgtaaactaaacaaactctttacaaagccaaaggccgtttttctgaaggtaaaatttcggttataacatatatgttacaaggtgtaaatatttctgtctagcaagaaaatactttaaatcgaattaaattgatacattacatgacttgaaacaacggaattattacttcttcgccgaattcaaattgtcatttcacagtcgacgaaatacatgactatgcatgctacactttttttcaccaagtggcttcctagtaaaagatattactctagactttcagcaatacatgaatttcacgcgagttttaaggacataatataagcttttttattgaaacatctaagcagaggcagcaacagcggcagcaggctttccagaacctaaataaaattttgttagcaaaagattagaccagcaaaaaccgggatgaattcacttacggaaaccatttttgaagctacgatgaaccttcttcaaatagctcatacggccagtaccagtggttcttcttctcttggccttagcaccccagttgtagctacgggtcttagcggcgggataaccacagcaagcacaggtgctcttttgaatgtggaaagagcgttttccacaacgacggcaaatggtatgagacttgttatgtctcataccgaatgattgagtacccttagtcatatttgctagtttgttgctggcaaaatatttgtcattcttcaatgtttcttttcgaccaaaaaaacagtcacatttctcagggtagggcaaatttttagtgcatttagccagcctaaagaaaacagttaaatatgtataaggaactctaagaactaataaatgaatgctacgccgaagggcttgctataaacgcgtaaggaacacatatgtaaacaaatacagaaatttcaaaaaaaataaaaaagtacccttaaacaattaatttaaacatgaaaatgataaagttataactaaaacttcaaacatgaaaccgatattgtttatgttggatgcttgaacgaatgaaacctttttaagcttaaaccgccaatgcagagaccacaggtgagaaaaccaggtcttctgttctttgtatgtttagtatttcattcgaaaatttagaattgtgaatttataactttaaattccactccaaatgaattaacgttgtatttaaaaccacctaacaagtcccatgtcaaaggttacgatcggcattcaaaatgatgcgtgttgatgttgactctcccactttgcagtcagaagttcgatgtctaccatgttcttttcacaaccacatataggctgtcacatcaacatatttatcagcctcgtttttcaaaaccaacctcattgcagctgaacagacgtcggtggctgcaccgtcgctgcgttatctcacaatgaacggctgctactattcaaactttaacccttggggtagagaaactgccgttgaatgaactggaataggagcgcggatcccttttttatgccttctttggttaagttgttttaagaaagtagagcaagcgccgaaattaaaatcattcgtttcgaaaattcatgttggctggcgttgtcactcatgcagctccagcacgctaaccgctggttaagtcattccgctcaacttttgttagaacagtgatttctttcctttttttctattgtttttacttttattcttttttacttcttctattcaggcctatttcggagtgagagtggtacgctgaatccgatttttatatccatccagtattccacccaaaaaattaactcataggcccttttacctgaatatccaaggttttttacaaccaatttctctttaaaggagtaatgtcttttttatttaaaaggaataaaggatctgcgcataaaccgaccaaaccaaatttttcaaaaacttcaaccaccccttctacatcacaattgaaacattctcatgaatccaatgtaaaaatgtcaacctctacagttaccgagcataggaaaaaaccaactggtagtggttcccacattaccgcttctccatggtcgaagcttacagtacgcggaagttcaaatgttctccctcgatactcccacgcctctcatctttatgctgaaggtggtcaagaaatttatatctttggaggtgttgcttctgattctcaaccaaaaaatgatttatgggtattaaaccttgctactagtcaattcactagcttgcgttcccttggcgaaacaccttctccacgacttggtcatgcttccattcttattggaaacgcctttattgtttttggtggactcacgaaccatgacgttgcggatcgccaggataattcgctttacctattgaacacttcctctcttgtatggcagaaagccaacgcttcgggcgcccgacctagtgggcgttacggtcatactatcagttgtcttggatcaaagatttgcctatttggtggcagactcttggactattactttaatgatcttgtttgttttgatttaaacaatttgaatacttctgattccagatgggaacttgcctctgtcgtcaatgaccctccaccagctcgtgctggacacgtagcatttactttttccgataaactatacatttttggtggtactgatggtgctaatttcttcaatgatctttggtgctaccatcctaaacagagcgcttggtctaaagttgaaacttttggggttgcacctaatcctcgagccggtcacgcagcttctgttgtggaaggcattctttatgtttttggaggaagagcttccgatggtactttccttaatgatttgtacgcttttagactatcgtcaaagcattggtataagttatcagaccttccgttcactccctcacctagatcctcacatactttgtcgtgtagtggattaactttagtattaattggggggaaacaagggaaaggtgctagtgattcaaacgtatacatgcttgatacatcgcgttttcgattaggttcggtaccaaccacctctggtaggcaaaggaatacttcttttttctcaaactctactggtaacacaaatcccagtgcctttaacggtcttttgacttcatcccgtatcccatcttataatgggtcgaaagttcgttctactagtcatccctctaggcagcaatatataggctcatcgaattcaagatttaatactaggcatcagaccatttctacaccagtatccggtcgagcaagcaatgatctgccttcacctgttgtgccaactcggtcaaattcgtcttccatcttacaacctagttataacttgaattcacactcaagtgatcgtcgtaatacgaatgatgatgatcaaagttctttgaatagccaacaactttccaatcaagcaaaagcacaaggtgaagtctctcctaccttatcctttgttccttcatcacactcaatggaacaagggaacggttccgtcgcgtctgctaacaatgcacaatcagaagcggccactagatctatcaactctatatccgaggtgtcagaagtgcgttttccagaacaatcgagtgttaaaactgttgatgaacgaaaaagtcttgatggccggattacttctgtcactctagaaacacttgttgaaaaatattcagaactttcaaagcaacaaatcgttgaatggtttaagagtaaactttatgagattcttcgagattccgcttctaaaatagattcgttaacagaaaaattaaaagttgcaaacgccgaaaaaaatgcggcactatgtgaagctgctttggagaaagttcctttagcaaagcacaataagttgtcagatggtacattttccactcctgataaagaaaatgttcaatcaactaacgatgctcatatcatgcaagaaaatttcagtttgcataaagcgcttgaggtcatgcgtgagacttcttcagatttagacaagcaattaaaagatgctactgcatcccaaaaagagttaatagttcaaaccagttctttccaaaaggaattagtggaagaacgagaacggcacaatgctatatcgaaaaggttgcaagaaatcgagtcattgtatcgtgatagagagcttttagtcacgaaccttgaagaccaacttgttgaccaaacggtaaccattaacaagtttgcttttgaaagagaccaattccgggaacggtcaatgggttttgaaaataccataaaggatctaacccgtaaaatggaagctactgatatgttaaatgtttcattacatgagtctttgaggtcagtacaaacggagaactcagaactggttaccgaaatggctttgcttaaggcagaacttgttaaaaagcaggctataatagatgcaaacgctaatatctacgacaagttaactgctgatcacaccaattatgaaaccgtgtcagcggatataaaccaaaatttaaaggagaccctcgacaagttgttgaatggctcttcagactttaaaaacaatgaaattgagcttttacatgatcagattcgcataaccaatgcaaagcttgagaaacgggagaaattaatcaacgccagcaaatatattgaagatactttacgatcggaaattcaagaagctgcggagaaggtctcaaatttggaattttcaaactttaatctcaaagaagaaaacagcaacatgcagttgcaattaatgaaggctcttgaacagagaaatacgggtgctaaacaattagtaaatttacgaatgcaacttagtacagccacgtctgaactagacatgctcaaactcaaacttcgaactactgctttagcgttggaagagtcacccgatgattattccgatatattgtctattttacgggccgatatgagtccgttccatgatttacacaagcaatgtggtgttttaattgacaccctaaatggcgtcaaacgtggttttggcattttcgaaaagaaatttacggactaccataaatttttagagaatatatcagacaagctcaagagcgaggaagacacttctttggagacgcccattcatgaaaaccagagtatacaatccgaccaaatcaaggaagttggtgaagtccttagcgcaattaaatcgttatccgactctgttatgttgttaaaaaatcaaattgacgaccttgcaaaagaaaaactgcctctttcgtcttctgatgatgaaaaagtgaatatcaaagagaagacggatttcatgaagttattggttaaaagcggcctctcaaatcctccagctaaagaaccagtccatgacaacgaaaattaactctttggaactattttgaaagcatctcctttactagttgaaaggactgtacatagtgtaaatattcgacgatgacatctataaataaattacattttaaactggtagccctcaatctctatgctatttaatagttacttaataaacgaacataccaaattaacatttaatatatgtcacagtgtattgtttgaaggactaattacttttttaatagattattattttttttttaaaaaaaaaggaaaaactaaggaagcaaacgctttggatcacgagggaatgagctggcaagacgaatattcgggagattgagataaaacataactacacgttccaaaccaatgccaccaccagcatgaggaggacatccaatagcgaatgcatcaatgtattgttgaaggccaacatcgggtgatacaccgagagctttcatgcgttcaactaacaactcgggatcatgaatacgttgagcaccggacatgatttcttgacccttcatgaagaaatcgtaactgttagaatatctaggatcttcaggatcaggcatagtgtagaaaggacggacgctactggggtatttatcaataacgtagaagtcggtatgatacttctcacgaactatttgacccaaagcacgttcctccggtgtgctaaaatcatcaaattcgggatcctcgcagtaatgaaattcttcgtcttcaggaaccttttgtcctggaactaattgtttacgatagccagcttccttcaaaagcttaacagcgtccttgaaatggaagcgaatgcgatcagcgtcaggcaaaatgaagtcttcggagggatattgctgacgaacgacagcaacctgtttggcatatttctcacggatagttttgaaaatgtacaaaaataacttctctatgaattccatgacttcatgatagtgctcgttgaaagccatctccaaatcaagaccagtaaattcggtcatatgacggtaagtgttggagtcttcggcacgaaacacaggtccaatttcaaaaacacgctcacgatcagcagcaataagcatttgcttgtaaagctggggggattgggacaaaaatccatctgttttaaagtattgaattttaaaaacatttgagccaccttcactagaagctccactcatcttgggcgtatgaatctcgttaaagctattagataacaaaaattcacggaaagcttggcaaataccggcttgaatgtcaaaaatggcttggttggtaggagtacgaagatcaagtacacgattgtccaaacgtgtatcaagattgacacgaacaaatttggaatctccctcagcagcattttcttcagattctctgatttgctcttcagaacggccagcatcttcaacaagaaaaggaaggttctttttaatgggagaaatgacatagatagagctaatgtgaatttcagcatcctgaacagtagcactcttgatgatttcgggactcttcttgacgataccttcgacaagaacgatcgattccaaactgatactgccacaccacttcaccatttgcttgctaatagtatccttgttgacgacagccaaggcttgaatagtgtcgtatttctgtctcaaagaaaagaagcacatcttgttaccctgtaaacgagaagtgtaaactctagctctgagcaaaacagtttgcccatcgtttttagcagaaatgtcggaaatttgagtatatgtacgaccaggcctagcagtagatctgtttaaaggtaaatcaccgtattttccagcagagtagtcaatttcgttggcttcacgcttcttcttctcctcggcctcacgagcctctctttcttttctcttttgttccttctcacgttctttttcaagtttcttcaaagcctttttggaaagaggttttccatcctcactacaaatgtgatggttagtgataatttttaatgatagcattctgcactagcacatacccaagaataacctcttttggcttttcgttcttagcctctaaagaaagattttctacctgtttttccatctcagacatcctgagtaaaattggcgaacggtatgttttgataaattagcgcagctcaatctatatgcgcgagaaatcaaaactactgatgctgagttgtaacgctgcataccttattgatggtataatgcaatacaatgattgctaaagtaatttttttacgatacggttttttagaatatcaagagccttcaatatcattatgtggttaaggaaaatgagcaatagtacgttataagttgagcttactcaaatgattagaatggcattttccaagccttcgtgagtcaaagaagattcccttttttacaatactcgtattgagctaaaaacttagaatctctgtgtaaataataattcaaaaaatctttttcattactttcaaataccgtgtttcactgagtagaacagtcgtgactacgatgtttatatggtttcgagaagtcagtatcagccttctaatgattcgacaaagaaaggtcaatgggtatgcaaatttttaaatttataccttttcatatgtactcggagacagaccaccgacgctaattcagaatttccgacgtttttaagctcatttgtagttaaaaatatatgttaaagaaaaatttaaagagtttcatattaagtaaaaaaatcctttttttattaacttaaaatgatagtctctttaaaatcaatctcaaaattactgtttacccaacttaatccttattggttgtagcttgtcgggtattgctaagctaaaacatgaaaatttttaacttcgcttaacctttgcactacttaacaagaaccatcttgttaaaccttttgtgatttcctgatacgccttgtatatatcactgacaaggattttttagtattcaaagtattattttattctgctttgatttcctggtttggaatttctaataggttttgaacaatcttgtctatttgcttttatacagttttgaatcaatatgtctaagcctttaaaagtgctgtgtcttcatggtaagtgtagaatgttttatatatagaggaaaacgacttcaaatgttaaatttgacttaaaacccagaattgggcaactttgggtgagaaggtgctaaggaaggacaaaagtcggttgtgtcaaacttcattagtcattgagtctgtttctcttccatctcttttttttaaagaattgtttattaactcgtgtcctatgtaggatggattcaatctggtcccgtattttcaaaaaaaatgggatccgtccagaaatacctgtctaagtatgccgaattgcattttccaacaggtcctgtggtcgctgacgaagaagcagaccccaatgatgaagaagagaagaaacgccttgctgcgcttggtggtgaacaaaacggtggtaaatttgggtggtttgaagtggaggattttaaaaatacatacggaagttgggatgaaagtcttgaatgtataaatcaatacatgcaagaaaaaggtccctttgatggacttatcggattttctcaaggtgcaggaataggtgctatgctggctcaaatgcttcagcctggtcaacctcccaacccttatgtccaacatcctccttttaaatttgttgtttttgttggcggtttccgtgctgaaaagcctgaattcgatcatttttataaccccaagcttaccactccttcgttacatattgctggtacttctgataccctggtcccacttgctcgctccaaacagttggttgaacgttgcgaaaatgcacacgttttgttgcatccgggacaacatattgttcctcaacaagcagtgtataagactggcatccgtgatttcatgttttccgcccctaccaaggaacccactaagcaccctcgtgatcttacaatgattgtcgcggtttcttcgccaaacctcggtatcggaaagaagaactccatgccttggcatattaaacaagaaatggcttactttgccaatgttacatcttctaccgaaagtagcggccaactggaagaaggaaaatccaagattatgaacgttgtaatcatgggtcgtagttgctacgacagtttgcccaagaagaaccgtcctttgaaggatcgtatcaacattgttattacacgcaattctaactacaactttggtttgaccaaaaaagaaaagatgcccgagaatctgtatgcggctgattgtattgactcagcattggacctcgtggctgagaagtatggagctgatagcgacatccaagttggaaaagtgtttatcattggtggctctttcctttatggaagtgctctttaccatcctttgaccaaaaaccttcttttcactcgtatccacaaagaatatccttgtgattctttctttccctttgaaccagctgaatcatctgactgggttagaaaggctcatcctgaattggaaaagtttgttggtattccggtagaggaaggtcgtctgaaggcagcttcctcaaacaaagaagaggttgaaatagaattcgagctttatggaaagaacgatgatgttaatgtagctttagaaaagcttagtatttgttagacattgtttagtgatttttggttgtttttttattttcaattttttttttgtgttttttacttttcacttttagctatacttgtattattgtaatggtgattaaaaaaaggtacatattattgaatgatttattatttaagatactatgcggaaatgaaagatagaagataggttaggcgcataaaggagcagttaaaaacaaaaaaaaaacaaaaaaaactattgcatatagatcaaaaaaatagtttcaagtagaagaatgtcaatgttgcttaaccggggttacttactttctggcaacagtacaagtaatgtaaccagatggataggcttgtggttggtacaaggagcagttagagccaaggttgtcgatgttgaaaggagcaaggttgatctcgaagtaatgcttgttgggaagagcgtagtaaacttcgttgatggcgggataagtgttgatgattgtgtcggccatcttatacatggtagcttgaacactttcactgtcatccaaagcaaaagtctcaagggtgatttccttgaccttttcgtagatgctgttaaagtcaaagccggcaagctcttcgaaagtatcaaagtgcttgaaagtatagttgcagtcgatggaagtggaaaagatacgatcggtgacctcgggtaaagtggtaaattcacacttgtggaagttggtgaaaccactgccagtactcttgagaaccaagacatccttcaaagagctaacgacatcgaatcccttgccttcagaaaagacaacatgggtcttgcgtgtctcaccggggttgcgaatgaaggaatggctgtggggctttccttgaacctccatgcgagtccagggagtgatggtgatatcgagggcagctccatggatgtgcttgtatttatcgacaaagtgcttggcaagtttagcggcgaaaacctcgggaacactgacatcgttgttcttggcaaacacatagatggtattcttttgggtgtcggtgggaacgacgatggagttatcggccttggtgtaagattcttctaattcaccggtcaagagactttgaacatccatttcgtagacagtgtgagtcttggtcttggggcagatatccttcttcatgaagcgaaccaaggtcttgccataggcgcattgcttaacataggtggtttcagacattgttgatgagagtagagaagagtaaacaagtgaatgtgtaaacagtagtagtgtttgttgttaaagagagaaattgttctcaatgggtgatgattctaaccaattcacctgcctttatatacctttgtacaacatccagatgtgcactagcgggctctgagtgtataacattatcaatcgtaaacactacccaacttcaccgttagagagatagcgcatcgctcaggggtgcgattcttcggagtgagtttcatcagttaagtaagcaggccgttttcaagaagtctgttgttcgtacatttgtgcagcagacgctgttcgagaacggtagggaagcagcttttgaatggagaaagatgggtcctaaagtcttgaatcacacactcgcacatactaatccacccaccaacttttgcttgctcaaaactaaaacgacatttaaggatgcacttaataaaacaataaggtagtttaacgcagcatcgtaatgttaagaaagatggacgatgaaaattgcaagtgttcttctaagagtcataaaaaaaaaaaaagggaagaaaaagaaaaattgcattagaatgaaaaggaaatttaaaataaaatatatttatttgatttattaatacatttatttattttatgtacgatgaaatagatgaaaaggatggaaaaatgggattcctgttgaaacggtccaaatttccaacaattgtttatttcccatttcccccatactttctctctctctctctctttctctttctctaagaatattatgaaatttatcgctttactttattacattttactgcactacaaaataaaattttattcttggaatagagcgacgtaatctttgcgaaaccattcttttaacgcacattggtacatttcttaaactccgatattctacttgcacccactctacctaagcttctttgaattttcattggatcggtcgcagcgtaaagataggtaaagaaggaagctggttggagatggtaataataataaattacattattggataggctgataggcttgttccaaatgagaatgcaacatcccttttcctttgtatcccttttgcttaccaagaaagtatcattggacccgtgtagaatgaggaaactagtccgtggagatggaccgttggggattggagcgttgtatcgtaagcgagaatagtgtagggtgggttcagcaacggtgagggaggtaatgtgagttggagtgaaagataaggaaatggaaggtggtgcgatggaggtacgatgtaggagtttaataaaaagatgaagggtagtgcgttggaatgtgttgttaagatagacgaggagggagtgtgtgtgtgagtgtggttgaattagaattcgtatgtgtgtatttgaatttgaatttgactttgtatttgaatttgaatttcaatttcaatttgcatattttcaagtatattgctgattaatcatttgtcatgaaaacatcaaaagaatcaactcaacttttttttttctcttggatgtttttcttgtttttttcttttttgcatcaatgaattaattcttttctaaattttttatttattcaatttttttatttattttaaatcctcttctctcttctatccttgtttacactctctcaactacagacaacattgttacctaatgcccccatacactatatatacacacacacctctaccttcgttcttccttaaacaacgtattcattatattccttgtccaacatgtttacctggtaaaacacaccgctagttgacactatctatactgactgatgctgttggatggtgatttctagtttagtttttctaattacaacaatatattttccttagtggaaatgctttgagtaacttcttttcattttcatatattcagactaaataggtaagctcgtcttttgcatgcaggaaactgaaacgacaaatgttggattgcaaggatgcttaatcatctgatttaatgagcctgatggtcttgacaaccaaaatgctgtcaactttgattactgagcaatttacaaacgaatgtcaaaactctttttttgtctttttcctggttcagacaattagtttttcttaactccttttactaattcttttttttactagtcaagcttcttttttttttatagtttatttaaaaccccaacgttgctactctggtattgccgtgggttgaataaaattgtccgtctcatgaaacgctaagacaagccatgttttttatagtcattatgaattaataataataaaaagaaatataaaaagatgaaaacattttaaaacgatatatgtttttcccttggcgtagacacgttcgtatataattaaaaaaatgacacagagtgaaacgagtttattaccgccgattcgctgtcgagtagtgatggaaaagacttgtcttgctttactttactccctggaatttcgttgcaagtcgttcattaacagattttctcattatcgtgtttggaaagtgtatacgaaacacagcataaagcatacttaatcctcatcctcggaagcgctgctgataccctctgcctgagcagaagaagcataatccctctcttgcgaagatagacccctcaaagagattggtttgctggccgtttgggatactgtagaggggtcgtctatggaattaaattcctgatcaaatcctagctctaactctttggcaaagtcatccaactccatgacctccatgtcaggctcatcgttggtatcggtggtgattggtcccttgctagatatggcaggatatcgagtattgctcgatgaaggttttatttttccatcctttgaagcttccaattccttttctttacgtctcgtggaattagtcgtgaccgcactttgagaggtcgatttggattcagagatttgggaattatcagattgagtgatggcattagaaggtacagttttagagacttttggattgcgtaaagcatttaatcgagcaatctcatcaatatgctccagtgtgaatgtctaatgcctaatgttagtatcgtagtagtgacatgaaaacgattcctgttctatacatacacatgcacgcatgcatacatagattttaacctctttaaaaatagtatatgggacaataacttacctttgttttagcgttaaaaattagtacacagtccacattcctggctcgttggcatgagccttcaaatatatgaggcctgtcatcatcctaccaatgaagatatacattagcattcgttgattcaataacagaagcaaattgatgtttcaaaatttgaggaaccaaaaagtaaaaaaatgattttttcaaatttttactcctcatggaagaaaagggaaaccaactttgcttagtcaattttataatacttacaaaagttgaaggaagacgtagacgataggcttcctgagccttttctaaaacacctcgacgagaagggtccacactttctggtataaaattgtctataaacaaaaaagaaataagtattctgcctggagaaagtatgatgttcatagtttgcaacagagatatacactgtctctaaaaataaatgggcaacgtacatttaatagataaaagtccatttgaattctttgagaagctggacccgggaataactttgtatgatcccttctgtaatgaattcatgattgtttataatggtaaaagtcaggcctgtacgaaattggaaatttcgatataaatcaaataaataacgtaaggtaagacagctcaaggtttctaattttaaaccccagaaatgtaagctacgcagtttggtatctggtttaaggatacgtagaactgcggtgagttttccttgtggtctattatattacattacacaggttgtataagtagcaactgagaataggtattgtattaacagggttataatgttacctatcactaatatagctcataactgaactgaggaacgaggttcagttggaactctattcataatatttctaaatagttgttatcatcgggtatctatgtatatagacggatagttacccgtgattatcaataaacggatcttagctagtattccaacatatgacatatagtgatgcgcaacgtagtgtatcatagcgtagtgtagtattgctgacaagaaatgaacgataatggataaacactcaatttgctataccaatttgcgagcagctattttagcattcgtaaaaacgaacttacacagtgcgcgaccgagaaagacgttgtaggttgtacagtatatatcatttcggtacaaggatgaatcctttatttacaagatatatatacattcgaggactacctgcgcacagtcagcagtatgattgaaatattataaaaatttacttgcgtttcttgtcttttaggtgcatgtcgtagggcaaaattctcagagtatgatgactgttagatttattgctgctattgacaacaaaaacgtcacgatcgatttaaaaattagtaaatcagtagtcaaaatacatggtttttcttattgctgcgtcaatctatcattcattgatatttattagctacagctcatttctttttaaaaaatttaccatatagcgaatcgcgggaaatgaacgtttaacatttttaacgaagttagcttctaatacattaattacgaagagcttgtataaacagttgactagtgtaagcaggtatatgagcattgtgagcaaagcctttttgaataagattatgtttattattgtattattaatgtaccaagttgcatggggaaaaagtctacgacattttcatgaacattccattctcatttctctacctcttggattattatattaacttttcatttatggtaaagcaacataatctacggctttaccgtactcggttgtatggtgtagcggttagcacgcgagattttgattctcgagatctgggttcgactcccagtacgacctttttgccagagcgaacagtgaaaggaaagaagcaagaattgcttttagacctgggtttggattacttttttcgatatcgccatagctttattataagtaagggctcctcgatgcgctagcaatttcaaggcatcgttcattagtgtctttgtgagggtatattagccggagctggagcacattgaagcttaacagtatcaaaatttattttttatattgtaaatcatttctactaaattatttacccacccttcattttcacgcttttctacccaacaacgatttggttaataacgtaaagcgtacgaatttgcaaagcaacgcttccgtggtgtacagaaaatcgctattttttaacgagacaactttaaagcgtaatgcgatataaagtttttttaaagtatccttatatattatttagctagcgtggttaaattccctattaatttgctcatacacttttttttgtttcctttccgtaactttactaaacgcatcaaccgcaaattacaggttttttagctgggctaacaaaggtaatagaaaatatacacatgggccaaacactctcagaacccgtactcgacaaacattcgagttctggcggggatcgatggcttcattttggcgtttcacacatgcaaggatggcgtatttcgatggaagacgcgcattgtgcgttgctaaactttacggattccaattcttctaatcctccgacaagcttctttggggtctttgatgggcacggaggcgacagagtcgccaagtactgcaggcagcacttaccagatatcattaaaagtcagccgtctttttggaagggtaactatgatgaagctttgaaatctggttttttggctgcagacaatgcgttaatgcaagatcgggacatgcaggaagatccttcgggatgcacagctaccactgccttgattgtcgaccatcaagtaatatattgtgcaaatgctggggactcgcgaacggtcttaggtagaaagggaactgcggaaccactttcttttgatcacaaaccaaacaacgacgtggaaaaagctcgaatcacggctgcagggggattcatcgactttggtcgagtgaatggtagtttggctctttctcgtgccattggagactttgagtacaagaaagacagttccttacctccagaaaaacagatcgttacagcttttcctgatgtcgttattcataacatagatccagatgatgaatttttaattctggcctgtgatggaatttgggattgcaagagctctcaacaagtcgtggagtttgtaagaagaggcattgttgcgcggcagtctttggaagtaatttgtgaaaatcttatggaccgttgtattgctagtaacagcgagtcctgcggtatcggatgtgacaacatgactatttgcattgttgcctttttgcatggtcgtggtcttgaggattggtataattggattacacagcgcgtcaactcgggagaaggtccttgcgcacctccatcttatgctgagttgcgaggacctaacactatagcggatgcaagaaatctgcagttggaatatgatcatatagctagccatgagtatggaagcggtgatacatacgatagcgattcagatgatgaaaccattgcctacgatcgctattaccttcattaagttattttcattgcttttttttttaaagcaatgaagggtttgtttgtttgtttgttttcgtataacatcctatctcagcaagttataacaggatttctcttctttttttaatttttcattactttctttccttccttccttcctttttcctaagtttttccaggctttctgcgatcgttttaataatagtttcctctttattcgggaaaaatatgccaattcatactactttaaaaaactcctatcccttcctctttctttgcaaaactactgacactttcaacaaaaaaaaattctttacatattatcgttaaagttagtatgtcaacaaaaggtctgtttttcgaatctgtctttttcggtttctatctttattgttggtagtttgtatcatttctttgtcaaacaggcaatataaaatgtttcactgctttagtttttgttccgttcaggaactaagcaaagccatcctttaatcagttttaatgctggtgttcagcattattaaccttttacgcaatttccactcaacaccgtttagcactccgatgtttgtattattattccgctcatctagtgtataatggaaaacggtattcccactaaccaactgaagcattccttttcttaaggaaaaatatattggtgggttacagacccaaggacaatatataaaaaaaagtatttattgtatttgagaggagactttggaactaatagatttgatatctttatgggtgatgttaactaatttatttattatttagtatatttgtgagcagtttagtttttgtacgatgtcaggaagcaaggggtttttttttagcatggcgtactttataaatcttcttttgagcttgatttaatttgtcgtcttatcaaattaagcatatatttcgtttatcccgtttgacaactgtgatcgcttgtagtcattatcgctaatttggtgcgaatatgtacagggtattttgtagacggatgaccttggttaatgaagacgttcgtttacgttttcccctttactgtctctatctatcgcttagcttgaaaacgttgtttagcaagtgaatgtacggatgatgaaaacctttaataaccattaaagctttcgtgtggatccggagacattttaatgaatactgcgacagagtttgttttgtttttgttgacaaaaaacgggcgatcccaatttttaacaagttcacggtaggatagatggagagggtaaatagacgtgtacggctagatatcaactacgtgatgaagctgtaattcctgtctaaaggatttagcaaatcgctgtttttttttagagagagagtggcattcactgttgagagtgatgaacttttttaaaaaaggatggaaaacgaaaaacccattgtttcgtggttttgttatattaaaccgttccgttctaagctttaaaaaaccaattttaccaaactattaatcatacgtccgctggaaaacgacgcgatcgctaaataaatatttatgtgaagaggattggtatcaaggaaagtttaataaattccttacctataaaaaaataatggatcgtatgctatgaagtgtaattatttacttattgtgaattcagtcacactttgagttccaatgttttgtaggtgaaaattttgatgaaatctgttacgaataaagtatgtacgaccaaaatttaattttcaaatcaatattttccgtttagcaataaatccatttacctacctttttgtgagtctcttagacaacaacatgcttaaacaacctcttaacttgcattgctctattggtaatgcttaatcaaactgttatatcccgtgtgtaccaaaaattaaatcgaacgcaaaactaacactataataacatttaacatttctaatcgtagctataattaaaatcattgctctacaatcatttttaagttttaaaacatattgtctgaatatactggtatttttggtatgttattctaacattatttttccaaattattattattattattaatttttttttaaattatttttccaaaaaactgttaatcactatacagaatctatgaagcttttatttacacctgttaaatggtttagatccatccttcattaattcataaatacagataattcgtagcaaactcatttcaaattattcatctctgctttgggcaattcacaagtttgttacccttaaacaaagcaaaagccaaaaagcatcatctttacgaagtatcagaaactggaaaggcaaattgcattttctttcatcacaacactccttgtatgttcacaaaaactattgcttcaatgaaacacattctcattcataatgaatgatgctctcttatcattgttgttctatcattaatttttttattttatttatttttttttaatcaagcagtaagtttatcatatttgcaacttcaaatgtttgatccaaaccgtccaaaaattaacaaaaggacaaattacgtcaaatcagtaagtagtaggatcgtttagttatgatcattggaaattgtttcagtgatcggctcggttgcaagtcgtttaaacttgacaaccaaatatgaaacatttgtgattgccaaattcatctttcgttgagaagtcatcctttctctctttcttttccatacttcatatacactctctactacttaacaaggttcgaccaactttgtttcaagaaattttgccttcctccgcattcgcgtaaaaatttcatccactttccttaccttccttctatccgattgcaattttttacaggcacgagtgcctcggatggataaggcttgaaacacccgaggcaacacaaagaaaaatattttttgcattctgaataccactaattgttagttgactaaacaaacgacgaaaggcatgcttgactcactcatgtaatttcacattccttggtttatatattaattcatttggatgcctgtcagataaattgttcagctctcgtacttccgtttttatcccacttaaatcatatgtttcatggcataaaattagtaccatctacgcgcgggtttaactgttagtaaaaaattgccttttactctacaacaagacaaacaaatgattcatctagaaaagtagcgtgctgttatcgatagacaaacataataactggtagttttgtgatagtaagaataatgatgaatatttttgttttaaaaataagaagccaatagaacctggagtcactaaaaatactttttttttttcattctcctaaccgtactaaaaaataaataaataaaccgaggaaaagccaaccattggtaagaaaaagtgttcactatccatactcacaacaaaacaactgaaaaccggtttctcgtcatttcactgtgtccattaaggaacagcaaatagtaaagtgatccaaaatgaagcaacgaaacttatcgccgtttttttttgtaatccttgttggttgaaaatcttccttctaattattttgaaagcatttatttactttttaaatagaaacaggttaatcatagacggcatggctttgaagggtagatttcgatcttgcaaatgaacttgcgtttacattgtcaactttgtctctcttggctttaaagcaagtgcgcaaagccacttactaagacaaggaaaaaggtaacaagacggaaaggtcggctatctaccttagcggcaccactttgtttgaccggtgatgtactgttcttagagcctttaattgttccatttcctaacagttcatcaaaatcgtcatcatcgaaagaagactccttgctttgtctgggattgtcaaccgatcctcggcaaacaaacgatttgcccttgatgatcccgtcgctctggcggaagggacaagtaaagtcgctcgatgtagtttgtatgttcaaacctcctttaacatctcgtaacttgggaagttcaacgctgctaaagttaccggtaaagtcgatggatcctgctacggtcttcaatttatcatatcctttgatttgtgccaatgctgcactgttggcaatcataaaagtacctccaatgctctcaagttgcttgaaatttagcgaagtcaattcctgattgcctataaagaaaagagactgtccaattcgtgtaatgtttgggcatgatatatcctgcaacgtgctgttgaggaagcctaaaaatcctttgacctcttctaaattcgaaagttgtaagtgagctacgcgttgaatcgtcatgtcacccacggttttaagtctaggaagggtaacactgatctccctggcattgtaagagacgtaaaacttcgactccacactttccaaatagggcatatcaacttctcgcaaataattgttgttaacaattaccatcgtatccgtagtattcaaagaaatacctgcaagtgtggagagttgggtatcctcgatggtgagcttatgggcctttttgatccccttatcgaatcgaatcccttgaagatttggcaagatacgcatcgttaattggccaacatttgccagttgaggtgcgtaaacactagcgagtcgtgtgagtttttcaaaccgtaattctccacccacactggaaatggatgtcagggctaccgatgcaaggtagttgttattacgaatgatgagatcaccggtaatggtctctattctattgaaattcaaagaagtagctgagctagtgttcatgatgatagagccattcacaacctgacagttgcttaaaacgtccaagtcattctgtgtctcaataatgtactcgggggcaccacaaaccgctggggttgcaccagcgatcactacgctccacgcagtgaaactggtaaacaaataaaagcgtgaagacaagcgcattttatgataaatgaagaatgaatataaaggagggaaaagttgttagggataataaaagcaataaaatctatcaagtacgaccaaaatttttgtcgtagcaggaagggattggaaatgaaattatgaatactgaagaatgaattcgggtctttgtagggtttggaaatgatgaacctttaattgtttatgatttccttgttgattaaagtttggacaagaaaaagtgccttaaacgaatgctaatataacaaaagtttatgtatatatatgctgggtaagaaaagaggacagagcgaagtctttcttcgtaatggattatttatacgatttttgttaaaaggaataaaaatgtagcggttatttccaggtagtttactcactggcatgcccttttatagatttcgaaaccgcccaactcatcttaatatggtaaaagttactcaggtttatacaccccaattactaaaaacatcttaagtaataagttgaatgtatgttaatggactatatgcggttcacacattcgttaattcatttataaatacggccttgagcctgcaccacacctaccatcaacaacaactttcaacaataacaaacacaaatgaacagcgaaaaataacgagagtaaataccaagaaagtaatcaacgcaactctttaaaatttttttttttcataatgtaaacaaacctacttggtataattgtttacttatttatttactttgcaatgttagtaaacaatgtcagcaacgtcatgcgatcgactttttcattgtttttctctacacgaggtaacattatcccattgaggggtatagcgtccgttgcggaggaaagttgatcataagtgacccacggattgtctctattttacaatgctcaacttgactggttgaatgttgagagtgtttacttcgttgattaccaacatttgctatgtcaacgtaaaactgcacaagttgaacataactggaaaaacttactttggattattataactgactaatcaataggactcatccgttggatctaggattcgctgcaaatcctcatcatacattattttgattcccgaaaactgcttgctttaaattttttaaaatcttaaaccttttttttaaccttttcatttaaaacatttttatctccttcgcaagctcaaaagtcgagaattggcatcgttgaggtgtcaaccgacaacggacctaaaaaggcgccgacaagcaaaaaaatttgtacgtaattgctatcaggaatttaagaagcggcaaaacttcatctgcttaatattcaaagtgagtctcgaatgtcaccaacggaagccaaatcttcggtcttgctaagaggcttacctatcctatcgtgcattttattttttcaatttaccatcctgggaatactaagtggacgtgcgtggttggtatgaaaacattctgcaccatttggacatccaacagttaaaattttgcgaagtcacagttgttggccgttctattttcagtggtattcccgttaatatcacactcaattcgtgctataggcaaaatcggaaaaaccaaagtacatgttgtttaacgatttttcggtaacgtcgtaaggctgtatatccaagtaataccggattaacattttacttctccgaattagggaatcatgtaaataataaaaagaaaaaaaaggaagattaggactgctacaaaaattaatgaattgacttaagaaatttggttcctgactttgtacgaaaacacaacacttttgtaacaacctttacgctagctaaatagtttactttttacccttgataggtcatcctgttcgttgcaattaatgttgagggaaagttaagtgatctcagctcatcaaataccagacattgcgcgtacatgaacttttaaacttaacgtccacggatctcttaaattcagctgtagaggtgaaaggcttgttttaaaagttttaaaatttccaaacggatataatagattgcatccttttcaccttcgtcaaattctatgtccccaaacgttcagaaacgtccttcttccgaagatattaaaacacaggagttttatgattcaactaggaacataagaagagtcgctacagcaataggatccatcaatgctaatttagagtctccacaattgtattcactcgccaaatccacctctttacaggaacccgttcgcatctatggagactcggtttcacccgccatcagtagctccaaggcccactccacgtcttcagtgagtccgtattactcggaaaaaaacgaatctcaagcgttgaacgcagatggcacagcatttgctaatccttcatttcattcttttggtctacctcaggaggactcacaggataacacccaaacctattccacaccttatacaacgatgaatccttccaatgagatgcatccttatccgccagcaacttttgaaaacaattactctgtccttcctgaccattcctctcaacccaatgcgtattcctttaccggctcaaatattctccctactcagtccccatctttaaaccaaatgcaagattatcaaaatctacaacaaaatggttcctctaataccactattccgtcattctcttctcagcatgacctttcgcaaggcctaactcatcaacccgtcccaaatcatgatgaatatgcattctcttatccttatgagttacaacggaaacctctgattcctgctcatccggtcccctcttttcgacctacctctgcattaaaggtcaacatgaacagcaatgttccatcgtctgattctgttcgtaattcttctccaaatcaatattatgcctcaacttccaagcagagcatcccctctcaatctcaaaatttacaaccaccacaaaaagcttctgtactgggaacagtcaataattaccgtcagtatcaaaattcttttatttctttaaacgattatcaggctgctcaaagcaacatctcttctccgtcctcaaggtttcctactccttattctccgagtgttccatttggcacttaccaggagaaggaaaaaagttattcgcaagatcatgcagaactttcatactatcagcagtctccttcaatgatgcctccttatgatagatcatctgtttattttcaacaacccctgtccagaaccgatgtgccaaatcaatcgtttcaacaatatcctactaccgtcgacggaggatccatgattcccaatctttatcccacatcggcagagcagatgggcttgtatcctcaagactcccaaaacaaagatacttatccaaagtctttagttaatagaccttcatcggccgtatgcgagccagctagaaatgattctatccctatgatggtctattcccagcccgtcaccattgaacaacggattcagtatgttttgtcaaattgccattgtttaagcgccttttatttgtgtatgccatccctttgccaaaaatcttatggaacggaaagacgatatctttgtccgcccattgtgctataccttttagggactacatggcttaataatgttacagacaatttgaaaatctctgctcaaactttggaagacaaagacaatccaaagtttgcaaaaaacatattttactataatgcagatggtgctttaatcagtcctgaaactgatattgcaaaatctacctatcagcttacaaattataatgaaaacactaattttgactcattccctgtctggggtaatgctctattaaaaactatttattatactggccaaggtaaaaatgatggttttggccggtccacatttttacaactttcggttcaatcaaaaaccaagtatttcaaacttgaaaatttaagactaggggttatttctaaaccaagtcagaaacgtgcactgatgaaagtgtctgacatgagcatacgccatggtgattgcgtttgtttattcaacagataccgggctcagcataacaatgcattattcctaggtaccagcaatgttcaaagagcgatatcaaaagtttcccttaacatgaaatacaattcgaattatttccctaccaccgacgcccctaacgatgctgaaaacgaaggtgccggcctggctatggcaaacaatttatgggaacctttttatattttttctgtcgatgaacttaacaaaggaaacaattccaatccaagtgactcaagaagcaaagtgttgtgctccaatatggttatcattttagtaagcaaaataaccggtgtgcaatcgccgcccttgatattaaagaagcacgataattggaaggtatcgctttcttcgagggccccaagtgaagccattaattgtctttccaaactagcctttcaatgtcacgaaaccaagcgtttcctgtatatagatgaaaaacaatctagtgaaatcagtttcacttcaggtgaattagaatactcagatcccaatgatcccacgaaagccactcattctgttcttccttggtcagccatgtggtcaattatttccacgcaatctgttcgaacgatgttttataacgaaccaattcaccaaaacgcatttcacgtagttcctagtatgccgtttgtgaaatttattcgacttgatgaaaattcaatgttccacatttatggcactgggtttgcaaatgatgtgcagatttggatggcgtatacgcggtgtgaagtgaagtctatcaatgcattcaagcctgatacgacgttacccccagacattatttcagactcccggttctcttcacgagtatatgcttgtactgcaaatttaatcgaattaatttgcgaaatcccggtgtgtatgtttgaaccaacagtggaattatctcccattttattatttcaatacgagacactctttcattctggatataagtggcctttggaaagtcactaaattatttgtctttactacttttttattattgaaaagtttttgcaagggattagtatatttatttttactctttttgtttttctttaaaaaatggttttattgtcaactacacatatttgccatatcctttcgcactactgtgtttatttattactacaactttgttttcccgaaatctgatattattgttactattatttatattattggtttgcatagttgaaattcggacggttagctttttgcataaaggtttgttactaatatttctattctataatggttaatgttgatgcggaggaacatcctcgtcagaagcctaattcaagtaaacatggttttcgcccttgattaaccgaaagtatctttttcgtaaaacgatgttagtgttatggaatgtctctactcggtcagcaattctttttcttaaaagaggagattttgcttgacacgttatttattgtataagttcttattcttatttaattatttgagtgataaacattgcaacagagcacaagaaatgagcaacaacatagcttggattaatcaatcgatgaaagccgtggaggggattgattttagtgggtgttgtacttttatatagtatgctcctttgtcattgtttataacttctggaaggtcggatttctattctttttattaattcttaattacttaaaatatttttcattttttttatttcctgtttattttcgaaagcttctctcaagttcttttggcatttaagacgagagaagctatttaatgtttctttctcttactcttgtttatttattatttgaaaaaaaaaacacgtcccgagcttttgtgatattcattcataatctaaagctaaagatgcttcaccaatcccttccgtcttactaaagcatatggatggacacatatttatgtttaaatgtttatacgcatatgtaatacctctttgtttattgcatcgcgaaatgcctgttgttccgcaaaaatgaaccgaatttgattagcataccttcgaactttattatttaatcaatcttaataaaaaccaaggcgtttaatacttgaaatcgccttagcttacattacaatatgtctatggttttacacctggtaagataaaacttataaagtagaccggagtcagaagatgtgattgtttacttcgagataccatgcgcgcaatataagaacagtttatatagcaatccgtaaagtagagttgtccgtattataaaaatagagataggattatcgatgaaaaatcacgagatttgtgatttcccttcctaaacattcccgttgattcataaactgtagcgattaacgcaatctagcaaaagttcataatcataaacatagcgcaaggtaaaggtatacaggataaattgcaataaatagtagataaggtaattgaaattgaagtctgtatgtgcaagtaaaattgttgtgatacaactcacaatcttcacagcactaaagctgcgtttctttgcgctgccaattagctgtcttttgcctaaacaaaaaaaaaagggattggtaaaacagtcaactagatttgtggcatatcttatttagtcggcagtagggtatttttttaaggaatttgatattgtcagggaggtttattttatccagatttgtgttgtaaagtatgtcttccttcggcactttgtttaaagttactacatatggcgaatcgcactgcaaaagtgtaggatgcatcgtcgagggatgtcctccaggaatgaatttgacggaaagtgatgttcaggttcaacttacgcgtcgacgccctggacagtctaatttgacgactcctcgtaatgaaaaagacaaagttcaaattcaaagcggtacggagtttggcgtgactctgggaactccgattggaatgctggttctaaaccaagatcagaaaccacacgattattccgatatggacaactaccctcgtccttctcacgctgattatacctacttggagaaatacggtgtcaaggcatcttcgggtggtggtcgatccagtgcccgtgaaaccattggacgagtcgcggctggtgcaattgctgaaaagtatctcttagaagcttatggtgtcgaaatcgttgcctttgtttccagtgtaggcaaaatagccattccattgcacgaaaccgcttcttccgccatattggacccagaggatgatacatttgaatctcctataaccgctgaatatctgaaattcctcaataaaattacgagagaggaagtcgataaaaccactgttcgttgtcctcatgctgcgacggccgccaagatggctgaacgtattactcgagctcgtgataaccacgattccatcggtggtactgtaacctgtgtgatccgtaatgttcccaccggtcttggtgaaccatgttttgacaaacttgaggccaagcttgctcatgccatgatgagtattcctgccaccaagtcttttgaaattggctcaggccgtgaaggctgcaaagttgctggatccaagcataacgatcttttttaccgaaatgctgatactggcaagcttggtaccttgaccaataacagtggaggtgtccaaggtggtatttccaatggcgaaaacgtttacttcaccattggctttaagtctcctgctaccatcggcgtagaacagtcaactagccgttacgatggtagtgacggtgttcttgctgccaagggtcgtcatgatccctgtgttgttccccgtgccattcccatcgttgaagccatggctgctcttgtcgttatggatgctgtcatgattcaacaaagtcgtattgcctctcgaaacctactccccaatgctcaataaattaaaaaaagttaaaaataagctagtttgggggcaagaatctcacttcaattgagttagcctactggattatcttattttgatgcgccaaaaagagaggattagatataccttttgtctcttagattacatatgtacattttttttggagggtaaatttaacacaaattaaggcatatttaacagatacttgtcaatatagtgtgtaagattataaatgaatatttttaaaaaaagtaaaaaatttaatacacaagaaaaactaaagaagtgttgcaaagagtataagaccttctcttcaactagcaattgatgtttgtttgtatgcagatttttttcatgtttattacacagacacctgcggtacacaatctaaattggtgaccaaatatagcttttgccattctcttttaatcttgccattgatttttctctcatctaagtattcatacttacacactgtgtatgcaattatgatatattataccggcagtttggtcatgttgcaaaaaattttttttgctaatgccgtttatcggcacatcgtctatgcttgtagatgaagtaaaggattattattatgtaaaaaaaaaaatctttggatttatgggttttactatcaacgtttccatacttgtgagaaaaagtggtagttgttttaaagtaatattttgaataatcgaaatttgttatagaatatttctgatgttccacacattttacgtaccaaaaaacctctgtaagaaaatagtattctattatgaagccttcttctcaggcgtacttctcgttagtcccacctatgatgaaatagcaaccatcccgtctactatctggaaaaggaggattacgtatagtagtgtaatacggaatagtgaaaggtacttcgcaaaaatgatcattccaaaagtgctcatcgtcatccctcaccaggtgtcgtgctacggtatagatgtacctaaccttttccaaccaccagtataacgtaggcttgattttaaacaagatattaatcaattttggagattgaggactactaaaaatctacaagtcttaaagaagaaataaatttcagagtcatttagcttggtagctttacgactatagccccgccgaaatacgagttgcctagtccccgatagaggaaaagctcgattagtaaatccggtaattcatgtacttattgactattgaagctatttaagaggactcgaggaacacttcctgatgggatcagtgaataatgaagaaaaaactttaattgagccacaacgtcttttacggaaaaatacttggcatccagaggtagacgatagcgaagttcctccttctgtctttcctgaatatcccgtccacaaggccatccagaaaacgtccgattcatttcgtaaacggaactacagcgcgggagattatgtaatagccccgttgggcggagaacgtgaaggaagttcgttaactcactcatggacttttcaacctggtaagcataaccagcgtctttattctgataattttcaagaggctcagcgccagtggaagcgcctgcaagaatggggcgaggtgaaggaaacaaaaaagataagaaagcggtttgatcggttttcgggtcgtaaatacattaaccactatgagattataaaagaactaggacgtggtatgcacggtaaagtcaagcttggccgtgataccgttacccgcgaactgttggcgatcaagatcatcccgaagacggaacgtcgtccgaaactgggccgagccaatgcttccagtcaaaaggaaaaagttcgtcgcgaaattgccatcttaaagaaatgtgtccatcctaatgtcgtccgcttgcgcgaggtcattgacgatccatcctcaacgaaggtgtatcttgttttagagtacatgagtggtggggaagtgccatggacagattgtgactcccccgtactctcgattagcgaggcaagacaatactttcgcgatgttgtcttgggtctagagtatttacattaccaaggcattattcatcgagatattaaacccgccaaccttctccttaactcttctaattgtgtcaaaatatctgattttggtgtttcgtacattgccaacgctggcctgaatgaagacaacgacgttgagcttgcaaaaactgtcggcactcctgcttttttcgcccctgaattgtgctggaccgatttggatcgcccaaggcctaagatttctgaagcaatagacgtatgggctttaggcgttactttgttttgccttttgtttggtcgttgtccatttaatgctagcatggagtatgagctttttgacaaaatcgtcaatgagcgtctgaacatcccttctacacccgacattggtgaagagggtcgagatttgcttaaaagattattatgcaaagatcctgaacaacgtataacacttgtagaagtaaaacttcacccatggacattggatggcttgaaggatcctgaaaaatggttgcaaaacactgatcccagtaccgtcagtcgtgttgaggtttctacagacgaagttgcttctgcaatcagccttgtgggtcgtcttcgcagaaaacttggtaagctgtttcgtttccgccgtccaaaagcgcgagtgtttgattcttcctcctctgttccttccgactcttccatttgtcggcctgagagctctggtaattcttcaattggtttatccgcgtccgagttgtccgattcttttaatcggcttgcggtgaatgagtctcagaaggatcgtgaaagaaagcaagtacatcctgtcgaaatgggtcgtaatagttctgagaaaaagcctagatgtgactttggctgggactatgaggcatttcccaatgacaatcaagatgctgatgatgcttgcagctataataccggcgactctattccacaagtctccaaatccattaacggtcatttcgaaacgtatagtcgcacgtcgatggatacggatgatgtagcctctttcgaatctccaaatgcgaagcatgaggaaagtggaatgcctgtcgttacttttcgtaattatgagaattatgatgctaatccgtccaattttcatccagtggttcctggttttgtatcatcacctaaccttcatttagccgggggctctgacacacctatctactgcattgagcattccttcacaccaactaattgagtgctgtatgaacatttcccaattttattcaattgttttttttttgcaatgtaggttgcatgtgtcttttaattactcatttcttattcttggctttttacctagtgttcaataacactttgtcattcgttttcatcaaatcatgtcattcggaccttttagatttttatttgtcctatatgtttgccccatctcaagagaagcctttttttttcctttttctaaataagacgcttaggttccaagtcttttggaaaaaaggtgactttattgatgattcttgcgcattccactcgttttactcgtttattttaaaatgttttattatctaatgtgccttttgtttacctcgtatatcgtgattttttttcctatgagcaaaaaaaatttactgattagacgttgaaactggtttttttgatgaattcttcttattcctggcataggaaataaatatcattttattatttttttatgacctagtttgtaatttcttctatgtgctgttgtgatacaaatctattgaatataggtgaagtggggcaacttttgtatggtgtgatttagaagacagacagcaatattgctaccatttgagaaattttatcttctaaagcctacaaattggacgtatgaagaatttttataaactaatattttgtaagggaaaatcttcattttcctcgtttggacttattcgtgaagcagatgatgcttcgtcttcgaaccacagatgatctccgtatgaaatacagagttcctcatttgtttttatctctcgtaatgtgtaatatgagatgtagttattgcgattgtcttttttccaatacacgtttggatgacggtcgtgattgaacatacttccaagtcctagagctaatccttgtttgccttcgctccaaacatatgtgtattcgttaagaactgtatactgtccatgttgttcatattcttctttgctgaacatcaatacaggactaatctcaatgcatgtttgtgctggaataggctcaagagcaaatactcctcggccttttcgttctgtatcacgaatctaaagcgttagtaaacttataattagacacaatcgttcagtctgtcgactgattttactaaagaaaagaaaagaatgtgaaatgttttcttttatataaatgattatgaatcatgctgtgaatcgttgatccgtaacattaccctttcgattatacaacaacaacaatcttcgacatttgctttttctactgtctgactcaactcatagcaaaattcacacaaataaatataaatgaatcgaaacacaaaaaagttaatttaaagtgacttttaactttcttctatcttctagctatcctacaataccttacctcaagcggactacgaataacaggaatccgcattacaaaatcaatttgacaactgtcttaatgatcggtgtgcttcacttcttacaccttttgtgaattacttaattttagatgtttcgtgtctttatagatgagccagggagttgatttctttgggctcacgtttgatgtctttcttttttcatatattaaattagtaatttctaatagaaataaaccaaacaaggaacttatttcacatatacgaatggcaaaaatagttagtaagttaataggaaaaaatttatttttcccaaataaggcagctataagactccttaaacctattgtggtgatacttcgggtcatggtacgttgctatattcactttagtagataaaaggttatagtgcgctatgtttttctatcgaacattttgctgcataaacagtcgcaagttaccgttttccatttagtgtatggaggatgctttttgaggtattggcgatctgtagttaaattggcatttgaacaggttggaaagtgcgtaggaatagttatactgttagcgttgaagtgcccaattccttacgaaaaaagtttcgcacgatttatgtggaatcgatttgtggcatatttagtaagtttattcttcaaaaatataatataagctacaaaacaagttatcttttccttaattattgcatatgcgattgcgatcatttacgatgctttaagttgcgagtggaatggaaagtatcgcagatcatttctttctcgcaggtctctctaacggatttgtgagtgtatccaattctcaatttcgagcagatagacttgatgaagacgccatatctgtttctagttctatcatccaaaacaatacaaggaagtcgccattaaaaagagtgtcaatcacttctgagtcttctttttataaagaaaatacctttgcgcatcacaacaccactggatccaattctgtgggtccaaagaagccgtttttagattatcatcactcaacatctaacacaccgaccaagaaaaaaaaggattcatttgaccatgcctccgttacgtccttacatcgtcgtagcttatcctctaatacttcaacacctcgaaagtatcattccagaaagccatactccgagccttctgtcatcgataaagagcatttacaaaaccgcgttagtatcggtactacgcatacccaaaatgatttgtatcagtcttatgttgcatatcctgatgccctgcccttattcgctgctacccatccattcgagagacgctatcctccttctctcctccatcaattcccttcttccaaggacataaaaaatgagacaccgactattgaccgttgtgatttccctaattatgttccgatgtttgcttttcctaacgacataactataaaagaatcggatgttagacctgtatcaacctaccactcttttgctttgaccagtgacaataacagccacttgtatgggatttgcgtggtagtttgggttgcaatgcctcaatctatgcaaaatgacttggaaaaggaatgtgaagtttggagagctaataatacgactgtggaagaccgtgaggttgccgagaagcttttatccagtttagaaacggagcgatcaaaactttcttcattattattaaaaatgcaagaaaaggaacttgaagggagtgattccatcgatcctatactcttggaaaagattgatgtctgtgaagaaaacattattctttatactgaacttcttcgtcctatgcgctataaattacctagatttgttcatggactgacaaataacaggactttatggatacccaatgcttatggattattgagtaagcattcacatttgcagtccttttgtcgggattggcttcgaatagtatgctcctctattcaagctgaagatctcgattttatcccttcgtcagatttaaattcccttaaatcactaaaccttcaatcgtttgtaaaaaacatttgctgtgatgttcctttgccgccgaaaggacttctgcagttgcaagttaatgtcggcccattaaatctttacgcatttaggagtccagtcaatgaaatcccaggttggaatgatgttgacttatatccgttatttcgtgcattaagtatccctaatattcttgttctttttgaggctgctttaatggaagctaaagttatatttttgtctgaaaacttaggaatgctgggatatgcatcacaagctttactacatttgctttatcctcttacgtggcaagggctttatattcctgttttacccaggcgtttgatatcttgttttgaagctccttgttcgtacattattggcactctatcgtacttttttcatatggacgacgttcctctggacaatattccgcttgttgtttgtgaccttgataaaaattctgtatctacgtttgggaaaattgttcgtctttctcgctcattgcgatctaagttacaggcccatctgaagcttgcggcgccacttcatgataaattttatgtaccacatagccctccaaagtacacaatggaaacttatccaaataatgtcctttcgttgagtacagttacatgttttcctttgagagaaaagttttctatcccagcacttttgtcttttagaagctccaatttttccaaaaggccttatgtactctctcctatcttaaacggtttccttaagcttcaagacaatccttcgagtatttattttgcgaagcaaactgactcgcgccagtcatcagcttcaaaacttttatatgcgcgtttacaggcgcctgagcatgctcgcaacttttcttctcccccttttacgagacctgcttctccatcttcttcaaagtttcggttttcttcttcttctttccaatcgacgataagaagaaattccctcacatcaccttattcggtccctgaacttcgttcttctgaatctaatcaaaataaagctggttctattaacaccggatctgctgtgaaccttgtgagttctaagccaggagaacaaaaagttcacattatgtacaaagaggggcataagctgagacgcatctataaaatgtttcccgcggatagcgctggctccatttgcgctgtctcaggatatgcattgggtgacgtccatgttcaatgcgataattgtgggctacgtgttaatctggatttcataaaacatatatcaatgccatgtgttccagcatgttttaatagtcagcagatattagtgacatttttaaaattctttataaaaatcttagggtcatatcggaattatttacgcaaacctcatatgtctcgtgaaaattttggtatttctaaaggaagtggtggtcttataggatcattcgacttcaataaatttactcggcaagcttccaaagttcacgggagttggatttcatcactttgtagctcacaggcatttgcagaattcattggcgatcgatgcgagcttgatctaaatgatccccgagtggcactgtttgatcagttacttctttgtgaacgcaatcatggtaaaccaaggctttttggaaaggccaccccttttctacgagacaagtcattggaaatccaaagaattgaggttgcacctataccagcttcgttgaagaatgacaatgctttacactaggttaggttatagacgcactatttacgaattattaatgctcaatagacttctttttggttatagttaaaatatttaatcgaacaactctaaaacgcttttcattttttatactttgattaaatttgtgaatttttaatataaagtcatatacatcttaagttgagagaaattaaatactcattatgtttgactcatagttaaaaagctctaatcataatgaatagttgcacacttctttggttttataaatgtcggcgtaattgctaaaatgatcaactagaaaaaccttgcaacctagccttggctaactctcgtagcttttcaattgtttctaactcttttttatttctttcctcaattttatttcgaagctcttggtcgcgctcaagtctttccatttctcgttttgaagccctgaattctgaccgttgttttttttgcttcaatcgggactgaaatgagtcccggtctccgtataagtcggtttctttcaagtcttcttcattgtcagatgcttcgcgataatgcttcaaagcagctcgtttttccttctttttctgttgcatagcttctttgcttcctgctggttcttttggaagaatttcatccaacaattctgtctcccttttagcttgcgatttaaaagctgattttcgggatagctttctcaactcgtttaattgctcctgcaattctcgtcgatcttgtaaattttccaaagttggtcgacttggacctacaagacgagcataagagggttgagatattctctttcccaacgaataccatttacttttcatttttccatcattccatctttttacaaagcgtcgccagaggtcgtgtacagaatcttgatcacaagtacccaaatcgatctgcttctcttccttaacatattctttaaatatttcattgaacatttctttctgagtaatgtctttataattgattttcccctgcatattcaataaatatttcgaacaaaattgtacatgattttcttgtaatttttcaagttcctcaaacaagttaaacaaacgcggaaataaataaaattaaattcaataatactttacgtcgatcggaggttcatatattatgactctgggtacaacatttcagatagtgaaaagctcatgagcttgaagtcgtacaaggaagagtatgcctaaagtcaaataggagtaagcttaattaaatcaataaatacaatgccaaactgtcataaaatttctcaaaataagtttgtctgtttaacaagtttaaaatttgatatcacgatttaaaaaaaatactacattagttggtttgccttacaatgttttgttcactaacttatgttataccaaccattagctataattgattcagcgagagaataattgcaaaatcatcttcagaaagcgaaactaagaaacaaaaaaattgtttctctttcaaagataacagtcaaggaaaaagcagctacaaaaaataaaaaataagaaaaaatcgttgttcaattaaaatatgaaaactgaaagcatagagaggagaggtcaaagagatgggagatataccagtagttaaaatagagcaaagcaaaaacagagcggcgtagaaaattaatcgcacacatagtaaagtcaaagtacagataaacagcaatataaaaactttcgtttccacgtactttgtcgactgatataaccgatgaaataagatacgtgcataaattgtcttcctttttagaaattggagttgggggttacttagaaaataaaattctcacatccgtttactactcttttaattttcttgtcggttttcatgagaggaataagtggattaaaggaggacatgcaaacttttaatgagcatgagcaggagaagatgttgcatgggcttgagtctcgggtttcttaacaatgagagcgtcgaaggcctcacgctctttcctctccgcgataacctcagctaaaacaggtctgaggtaatggtaatcctcctcaggctttgtccattcagattttggcaaaattttattctcaatgctaagttgcatggcacggcgaatacgatagactcgatcgtaggattccatcttaggcaaacgagataacgccttttgagtatcgtcattctcctccaacatcaaatcgtcgtatcgaagaccatatttacggtatcctgacaaatgcacataggcattggagatgggtaaaagcaatttcgtcaaaaatggtgatttttgaatatacttggcaagagacacaggtttcatacttaaacaatcacttcagcaaaaaaaaatttcgtcactacaaaatttgcactgaaatcaataaaactcttagttttgaatattggaagaaggtaagatctcatggccctatagtatgccaatgaatccttcggtcacctgatgttacctgcacatagaatcctgagcggaattagaaagtaatgaaaatctgaatatcctagtattctcggctcatttctcttaagttattgtttaactctaacgattttataacctaaactaatttaacgacgtgtctaacatatattcgggaatgcaccattgctagtattcgtatgaaccagaagtttgctcaggttacatgttctctttcagtactaacctattgaaacgaatgaaatttatcaaataaaactcgttagtatgaaaaatacttaattatatagctttaataggaaaaaaaaagtaaatttatattggatcccatttgtgcgaatgcgctagctcgaatatgtcgagttgccagaaaggagctgaaaaactttaaacaaatgatagcgacataaccgcctctggcaatattagtaacgaaatttattccaaaattggataaattaatgaatgattggtttgcaaaagaatatattccatattactttgcatccacttctttaaatagtaaccagatcaagccacctttcttaaaggataaaagttgtgtttcataacataatatgtggctaacaccaatatgcataaatagtaaatgaacatagtaaaacgattcaaacgccatccgcaaattaacccaacgaggaacaaaattgtgaaagcaatgagaagctttgcatttcgacgattccggtgaagaacgtttttcacctgaataacttctgttggatcgttctgaagggctaaagacttactaaaatgactttcaaggctcactggctcattttgaatttcgcgattttgaccatcccctgctttaccagtatctttctttgcagtggactttaaagtagacacggaaaaaggtaaattcttctctatcacgttatcaccttttagagatatggaagggttcagggaaaatttacttggctgattagacgtcgtatgaatagaatcgtttactttgttgcccacttcttgaggaaccagtttcgataaaggagaattttgaagctgaagagtaggtttaagcatcggtcgaacaggactagatgttggaagggcggccatttttttttgaagaaaagtcataggggattcctccggagctctctcacgaacagactgatttcccaaatgagacgttgcgttggtattattcagaattgaaattgtcgcaaattgctgcaatttattctgcccactaattccatcttttctgtcactcgattcctttcctatccgatgcacagaagatgtactttcctgacgcttcttgcgtggtttcaaaatttcgccagtcaaatgaacttctggaggaggacttggctttaaacatgagatgctaatccatgtaaaacaaatggtaacaaagaaaaaggctgcatgtatttgacggagtaaaaaatcactttcaagattggtatccgagcttaagttcaaaatttccgactcataacatgaaaggagatacaagcaagttaaacggataataagataaagtgcctgacattggatatactgatcccgcccaaaaagctcccaagatggattgtccatcattttgtaccaatacgggttccaaaagacaacgaaaaaaccaagccaattaaagtaaaaaattttgctagaggatccatctaataggaagtaagagattgcttttagaaataaattacgaataccatctggtaataagcttattatcatagaatgatacaaatgccacacaatcgattgcaaatagaaaaacgaaaaaccaaatccacgaagtaaccaaagaacaaaagaagcttttggatagtgatgggggacttttgcgtttagctgttcctttgacttttgcagccaatatcctaaaacctgatttttggcttcataatcattggcatcaagttggtcttgaacggagtcatagcattcagagcaaacaatgggaaatttctcttctatagattttttatactctggtaatgccttctcataagcctgataatctggatgtgatgagtctggcagataatcagcaagcatccgattcacaatcagttggttcatttgacatttttcacaaaaggggctctgaaaggaagaactgcttgggaaatcccgtatcgcgtaaaaaggaccaacacccttgtcttgagttggggttggaggtcgataatccaggatatcacctttctcatcaatatggttggtggcttcacaaattgagcaagtccaagtagacgttccgtctctaattttttccttcttcttgttgcaataaaaacaagttactgttttatcaccaaaagtggatttcaatccatcatcggaatttcccaatccaagtgtaaacaatcggctagattccatttcccattataccatttaatgcaaagttctcatagaatcctgtgtgtgcaaatttaaaaaaaaaaagggaaacaacaagtcaaaccagcacacgtaagaagaaaaccaaacaactgatattctgtgagttaacggaaataaaatgcatgtaaatatcttttatatcaaggtacaaggtgtaatggtacagaggaccccttatacagaatgacctttatcaaacacttgtgctgcttgacaaagtaaaagagaagtactaaataacgagtgaagtaacaattagatacacttgaatagtataaaagttttcttgaaatgttgagcaagaaaactcgaagatttcgactatacagtttccccacggtgctcgtggtgagaatagggaaaaggccgaccgtcagcagggtcccaagccaattcgtagcgggttgtcagaacaaagttcaaacaaattgaggataaaaggagtttttgaagaaatgagctgtttaatttttttttgtttgtattttctttttcgagcttcctagaaaaaaaaaatttgaaccattgtaccagaagaacgatcagtgtttgtggcttatttttagagccttacttatgatatgctctacgacgcattgaagtggaatgcaatgagaaatatcttaataaattttctttttaataaaaccaaccgctcttaatttgttaggtgaaagtcaacaaaaaatctttttggtattttatgcaaataattcgtttaacaaaaagtttaatagtttttaagttcgcttaatttttaagctacaaaggaacgagtttgagaagttgtgtagaaaagtattgacaaaatgtaggctgagtggatgtctacaacaatgcctacaagccatcgttaaatgtcaaatgtattgatgaaacaagccgcttttaaatgaaagattgcatttgcatcttaagcttgcgccaacattgactgttgccccattgtaaaaaaaaaattcaataatgtctgtcaatggaaacggtgtatgtcactgactccaaaaggtcataatcatgaattaagcacgaaaacgaaaatttcatacaagtagttcatttttacttttcaatccttattgcatgttgagaaaggaaatctagtcttgtaactataagcaatagacagcatgatcatctctattctattacaagttgattaaaattgatatgctgcgccattaattaacttacgagaggctcatcgctacgatgaaatggcttagaccatgattatacaaaatattatagggtagagacgattaggaaattggatgtcttcgtaaacttgaaataggacgagttgcgaaagttgatgttttacgtggcttggggagcgttgttaggaaaagcatgatgaagatggcaaaatggctaagctaagataaacgatttcatatttagtatttaacaggaaacaaagccctttggaaagaaccaaattttaataattttttttttttacttcatttcattaccttttatttttaagttggacgcactgtggttttgagattctggatattggtatcctttttcttcttttctacgattctcgaagttttaaaagtttcaaagtattttaccgacattcgacaatatgtcgatatctaatcaatcgggtttggatattttgagagaagttgatgatgaaggtcaggaaaactctttcttgagaaagactacaaggaaaatccagcagttttttaaatcggatccgggctatcaatctcgcaaagccgagtacaacagtcctgctaaggctacgggcgatgtgaatattaatgttacgagtcaggattggttatccaagttggatcgtaatctatccatcgagaatttaacaggtaaaagcttgggtatcgtagtagtgtctgggagaaataaaggtctcataaagaatccgtttttaggggggttagtggatattgttatgcgtcgacaggataaactatatctcaaaagtgttgagcaagtgtcttctgaatattcaccgatgcaggaacaggtgtacgagttcaaagtagatatgcctttggtgcagaaacgattaggggcttttttaaagaagaatcgagtagatggattaagcctttcgatgcatttttctaccggcaactatagcttgccagtattaattcgacatgttttactatacgattattacactgacgacatgaaggactccctatggagagcaatgatcatctacgtgtcccggcaggtcacttccaataagtacacgaaatttcatctttggtgcgtacaaaagcggattggcaatattagaatgtacttggtacgaccgggagacgtttattcattccaaggacaaactagttgggccgccatttgcaacaaaagttacatgtgcaatatccagttggagcagagtcctgaagttagtgttaaaagttctttaccaaaatatagcaatgaaccaattttccaaagcaaaacgataagtcaagaagaagttggatggttgttgtttatgctctctataggtaatcacgcacgtgcgtttcccattcaaaattatctagccaatactgtgatggaaacagtattgcctgttgaactgagatgccctttcctttctagatcggttgactgtgaaatttttcaaaagaacaccaagcgtcgagtaatggaaaaatggcgtcaagaattcaaaaaggaccttaatgtgtgcgaagaattggaattcaaaaatgttaaaaagagtggttatatgcagcctctttttgatcttaccatgcctctaggttgcttcgatagcttggaaacaaaagaaatgttttacttacggcataacattgctggattccaggcagatcttaccccataccccatgaggatttaatacatactacatattcacaagtgcattctcttaagaaattcggtttattgaaaaaaaattaaaaattaaaagattagtgcagtcttaacacgaatttcctttttattaatgaaaatgatgagattaagtcatgcacgaggcaatttaaaatattttgttactgtgcttttttgtttcttttgtttttctgttttccattacttacgacaactttaaatttctcatttttgcatacttctgttttcttctcttacgattttgtatttatattcatcatctctttttttctgttattttgttgcattttcatatttcatttcggataatggccgcttataattcattattattattatactgttttcctttttcgctagctttatctttaaaaatctatatttcgttaaacagtttagacgctgtgaaaataaacggtttacctaagtcttaatatatgtataagtaagctcgatatgtatagcgtcagtaaacaagcacctgttgttttagacagaaagatcataatcatttatagcagcagtagaaagtacgaaattcagtttaaggcaaaattttcctaattgcaaatattggagggattttaaagcatactaattatcgctttaattctttcctttttgacattcaacgaaatatctgcaaatgagacgctcagttaatgaaaccaatgactttcaacttgggaactgattcattcctattgcaaaatgttgaaaacttctttcctgaaccgcgaaaatctcttaaactaaatcgcattctatctattcgcttttcagcgtcttgaatgaaaaatagagcagaaaacaagccttcagcacaagagagagcatgaaagtcgtaacgagtaaacgactgttaggaatgacagcaatactggactactctatgatacaccatgttgcgtatttctatatgtcacaagctctacattgtattatagatacccgttgataaaaactattagtaagattgtaaatagagcttctactgaacctcgtttcacagttcagttatgagctatatcggtgaccgatactaacagacttcttataacaataaatataatattgttagttaacataccgcttaccgctatgttgtaagtcgctagaaatctcgccgcagttctatatatcgttaaattagttccaaactgcatggacaacaaatagtgaacaccaaaataccacttaactactcattatcttacactgtaaggtaaacaatataatggcaaatcatttctcgacacggtaaaaaagacttctttttagatgtgtgggtttattaagcattattaccttttgaaaatgcaataatgttaattgaatcaatggcaatcatgggaagacattgcttccatcggactaattatagttagccaaagaaattttcaatagaattggaattaagattttttttataagttagcaggctcttctagttccatccctagccaggaatcaaacgcattgattaatttctttgaactaacagcggctttgaacacaatgtatcaagctacgctaatagcaagcttaaacgtagaaccgtattcaactttgagaactcagtgtcaaatttcctaatttctcttcttttctgatccatagtgcatatttgattttaaaagaaaattcctacagcgtttttgagggattattaaatttactcaaggatgcaaaatgaactgaacccgattttgctttcgcaaaactcaattcggtttgcaaccagagttgctattttcttcattattcgagacgaacttgtagaagcagtgacttggaggcatcctgtaaaatctatgtgcttgggacttacgatcacgttattgtatcttcatccagtttcattttcggcgattttgctcttggtatttttgacaatgatgccgataagtatgacccacgacgttaccacaaatcttaaagatttacaaaatttcatggcttcttacagctcttcttatgatcaactattgtattttcgacaaaattattatcaccacattactccctctgctatttcatctggactgctagtttctttagttctcatattcctgttggcatacctgcgcatttcaattgaccgttatttaccaattgctatttggattggtctaatttctcttcacccaaaattacgaagctatctcattcagttttattctgctaaacgagaccatgtgccatatcttcaaattcgaaatgagctcgcccaagtttggaggcacgttgacatttccggttcgcaaacaactactcgctacacttcatttccaaaattcaatccggagaattcagtgacctccctggatttggtcgaaccgccagagaattattcttgggctcctcaaagcgactggacttttgtacctcctaatgaatttcggagatttatcttatggagtccccaacctccaaagatgaacagaaaatcgtcacacggatcaaatttgcccttgtgaaggccttaaagcaaacattggttgtaggactttaacccattgtgtactatatgtttcgtaattagttagaggtgtggtctaactgttttactgtctgttgtttaactatttattaaaatttatgtaatcattatgaacaagatcaaaatcatattatttcccccccttgtttgctagtattcgatctgtgctgctaccactactaaaaaaaagtctaactgttttggtgccaaagctataattcacttattatagattcgaagcgtagaggacattattgttcggatatctttagaacctttcaaacacgtttgatattcttgcttaattctcagtagttggtacaaaatacattaacgtggatatggtagccaaaacaaacaaaaagttcttttttaattagataaaaagcgattactcggtataagtgctttgaacaatatacctgaatattagtcattatagctaggacaatttttttcttaccccttttgatgaataacggcagtatgccttgtcagaatagtatatcgaataacccaatccacacgtgcgggattaggaatttccgggcaggctttatgtataacagaagtaatttcactttcgcttaaaagagcagaaggatcagaatgaaaaaataacttcaaatgatgtcgatcagcaaaattcaataggtcgtttggtagtttacaattttggcctatgttaatttgggtggattcaggaacgacattcacggaagaaattagtcgttgcaactcattgacaccaaattcactaacgcctaaagtgccaatcttgccttcccctactttttcctctaatagtttccaagtgtcaacccaggactgaatctcttgcggaggtatctcgtcaattgaatcgtaaatttcattagaagagctattaccactttcctttaagaaagttatatgaggaaaagataccaccagtgtggaaacaaaatcaatgccaaaaagcatatgtaaattataaaacacctgagacagtgtctcttccctcttttttatgtctatgttctcaccgtccaaaaagaaaagctttactacgcaaagttagtgatcccgtacaaaacattccaagtgattagggcattgagatgagtgttctataatgaaaagcatttagagaactcgtgtattccaactcattcccttcccttatcaatggtaaattgcggtacttaccaataatttcatactcctcttgtttcccatctagtttttgaggcttttcgtttactggaaccaagactttaatgtttttcttcaaattttcatcaccatcacccgtgaatttcgtgagcttaacgttctctagagctttaaccaactagaaatatgttagaatacatttatgcctacaaatattcaagtatatttctgcccaaacccaagcagtacgatactcgtttgaatgtccaattcatcatttgcttacttctaaatttgattttatacgtgaagcattccaaatgccagactttaagtttttcgtcacatctccagtatacaaaatcaagtgttttttctcgttctgaatcattttgctttcaaataagttgaagtattctttttaaaccgaaacgtcttccagaaacgtatttcaaaggaaaaatctaagcgtttgcaataaaccaagttaattgaatgttgtgatggttgatgacaaatacatgcatttaatttcataatactaacaaccgactatgtcaactgagaaacagtttaatgaatgttttattgaaatactaaaaataaattacgacataaataattaatagaaaactgaaattacacgaacacttgttatcggtactcgtttcatcgacaatattaactccatttactgaatactcgattaaaggaatctgcagcagttccaaaccctacgaaacaaatataaaatctctatactgattaatattgatccttcggagctagtatggattgtgtaacaatatagtgtttgattattctgtaaaaataatgatttcaccaagctcttttagacataaatctatgatcgtcttaaatgttatatatatacccatatatatcaatatatactaggtatcatctttagtaaattttacgagtaggaaattcttgtcgctagtggagcagaagcaaagttgctgaaaaattgatttattaaatctttgtagctaattaaacaaagatgaacaaagcgaaaatttccgttttttagtaagccagtaattttattaaataaacaaaactttcttcaagcgatctgatttaagtttactcaaacatggttgcatcaatatccatcacaatggcattttcctccaaaaaatcaacccattggtgaaagaattcactagcccactttacagtgttgctatccccaattacacaaagatgccttttaggccttgtgatggctacattgagtcttctcttttctgccaaaaaccctacttcccgaacatcgttgcttctgactagagaaaatataattgcctctttctcgcggccctgcactttatcaacgctgcccatttcaacctctattcccttttcctttaataactgtcgtataagggctacctgtgcgttatagggagtaacaactgctatgtccttagcttcaagtccagcttctagtagtcctgatatatgatagctaacaatctgagcttcccagtgattgctcttactgtcttggtaaaaattttgcatatcctctgatcgatcatcttcttggtaattccccagggtgtcgtaaaagtaaattggtgaatcagtaagttcagtttcttcgacgttttctaaatccataagtaagcgtttttttacttcttcagcgggaactaatttgctatcgtaaaatgtatcagacgggaatttactaataagttcatgcattcgatattgtatatttagaaaacatttaaccaaatctccttgagatttaaccaatcgttcaaacatagatatataaggccttttgctttgtacgtttggtgaaagttgcatatgatcgccagccaggatcactttattcattcccaaaagaggaatccaacattgtggttccaacgcttgtgaagcttcatcaattatcactgcatcaaatctttggccttttaactgcctcgatccagcaccatgaagagtacaaaacacaaccttacttgccgaaacaatattcgctaccgtcttagcttcgtattttcgataatctttgcgaagttcccgaatatttttgtaaatttcacgacgctctctaccatttttagtttttgtaatcttacttaagcatacatctatgtcttcgcttattccacggattacgtctccattatcacccgttcgtgataaaacatccaaagaatgatccaaaatcgatggaaggagcctagcaggatgccctaagcggaccatgggaatcccagaactgcttaggcgatctactatgttgtcaactgccaaattggaagcaccgcaaaccaaaatacgcttgtttcttaaaaccaactgctgtatgatttcaactaaggtgtgggttttaccggttcctggtggaccatgaattagtgataattccttgaccgcaatggaaaatttaactgctttcttttggcttgcatttaattctttgttgaaatatttaatgtcaccgattaatttttggtctatagaaacatctgccttcttccttccaatcaaggtgtaaaaaagtgagtttcgatactccgggatacttcttttaaattccaacatagtatgtctcattctttcatacgtaacgcgattcaccaatttgacgcttttcaactgtcagtcatttttttgtaaggagacattgattaaaacttacactgacaaacgcgtgacggaagaaggaatatcttcttcagactttaaagcaacagatatatgtctttcatgcactcgggtaaccacaccctccactgagatatctgtttcgttgggacgtttttttttggaggattgaaaatcctgtcgaatactgacaacatcaccaggtgaaaaagagtttgctggtaattcttcaccattggagaacgctggatctttttcaaaatcaatgattctacaaattaaatgagttaaaaaagagtcattatgtcgtttcgaatgcttaaatgtacgttttaccaccaaatccagtttttacaactccgattctaaggttgataagtgctaatccttttctttgtaatacggacaacggaaagcgttttatagacttttctgtctcatcaacttcggatttttgagcttcatccacaaattcaatttccctatccccaaatttttgtatctgaccattattaattaataaagttataatattagtattaaacttacccaatcttcgtccaaacaaatttgttcatttgaactagacatgcttgttctgtgtgagtgaacgcttactcaaacgtaaatgataaatcccaaaagtacggttttattaatttaattactgattgctagcttttttttttaatttggatatcaaaattcatttcattattctctggccactagaagatgttcgtggtgttggtgaataattttcaaggcggcagttttcagcctaaactctaccaacacactggggatggatgtgttgattgagtgggttgcaatataccctcagatatatgatattttggagcatattaattacgttccaagcaacactttgcaacgtttgcgtttgcaccaaccctggtcaaaaattgactacgacgtttggtttttgtatgcatcggacgaaattcgtgaaacctgcaaagtcaaatattatggagaaacaaagacttacggtgaagtttttgttttagaaaatgaaagaatatcccaacttcatcgtctttttgtttcttggacggtctctgaaagagcagaacatctaaagaatttactatttgacgctggattatccaatttacctcttgttgaactagggggaaatgtcttttttaactctcacgtgccgcttccttgttccctagttttaactaaaagtacacaggaaaatttaaatcgcataactccttacttggtacaaaaaagaccaattcttctggctggtccagaaggaattggtaaaaagtttttaatcacacaaattgctgcgaaattgggacaacagatcattcgtattcatcttagcgattccacagaccccaaaatgttgattggaacatatacctctccaaaacctggagaattcgagtggcaacctggtgtgttgacacaagctgtaattactggaaaatggatcttgtttacaaatatcgagcacgcaccttctgaagtgcttagcgtcttgcttcctcttctcgaaaaaaggcaactcgtaattccctcacgtggtgaaacaatatatgctaaaggatcctttcaaatgtttgctacatcatctatgaaaacaaagattcttgggcaacgattatggcagatacttgatttgacttatcaaccagatgaatgtgttgaggtagtatctactctatatcctgttttatcaatcatttgtcctactttgtactctgtttacaaagatatatttgatcttttttcacaaagatcgttccttgccacctcaaaaatatatcgtcgattgtgtttgcgtgatttctacaaatttattaaaagggttgcgtttctatatcacaaatttatgatcccttccgaccatgtagtcatatctcaagaactccaagatgcagtttttaaagaggctatcgatatgtttggtgcgtttattccttctagagacggttttgatcttgtggtgcgtaacgtcgctatagagttaaatataccacctgaaaaggctttacaattacgatattctattcctgtatttcaaaatttggaacataacataaacataggtagatgttcacttaagaaattgtctactattcgttcttgttccactaattcatatgctttcacatcttcatctcttggcttattggaacagctggctgcaggtgttcaaacaaacgaaccattgcttctagttggtgagactggtactggtaagaccactactatccaacttttagctggcttgttaggtcagaaagttactgtaattaatatgtctcaacagacggaatcttctgatatgcttggcggttataaacctatcaacgcttccacacttggtcttccattgcatgagaggtttatagatatatttgagcaaacttttagttccaagaaaaatgctaagtttatatccatggcatcaacgtcagcacgacggtttcgttggaaaacttgcctaaaaatttggaaagaagcttgcaaattgtctaaaacggttcttgatggtcaacaacctcttcctaatcctcaaaaaagacaaaaacgtttatctaatcaggttgagcttcgaaatcagtgggctaaatttgagaaagaggttgaagattttgaaaaagttcttacgggaggttccaatggcttcatgttttctttcgttgagggtgctttggtgaaggcggttcgttccggacactgggtattactagacgagattaatttggcatcattagagactttagaacctattggccaacttttaagctcatatgaatcgggtatacttctcagtgaacgtggcgatataactccaattactcctcataaaaattttaggttatttggctgtatgaatccttctacagatgttggaaaacgtgaacttgagccatcttttcgatcaagatttactgaaatatatgttcattctcccgatcaaaatttagatgatttattatcaatcattcaaaagtatatcggttctctttgtattggtaatgaacatgttatccgagaggtcgctgaactatatcaagttgcaaagagtctttctctcgatggttctcttgttgatggagctggtcaaagaccacactataccgttcgaacattgagccgaactttgtcgtatgtaacggaaattgctccaatttatggattgagaagatccctttatgagggattttgtatgtcttttttgacgttactcgaccatactagtgaaagcttattgtacaaccatgtggttcgtttcacactaggtgagctaaatagggatcaacagaatgcaatactcaagcaaatccctaaagtacccgatcattctagttatattgctttttgccattactggttgagacgtgggtctttccccgtagaggaacaagagcattatatcataacaccatttgtgcaaaaaaatttattaaacatagctagagcttgttctactaggatgtttccaattttaatccaaggaccaacttctagtggcaaaacaagtatgattgaatatgtagctaaaaagactggacataagtttgttcgaataaacaatcacgaacacactgatctacaggaatatattggcacctacgttactgatgataacgggtcattgagctttagggaaggcgttttggtggaagctttacgaaatggatattggattgtattagacgaactcaatctggcccctaccgacgttttagaagctttgaatagacttttagatgataatcgtgagctttttatacccgaaacacaagttttggttaaaccacatcctgagtttatgctttttgcaacacagaatcctcctggtgtttatgctggtcgtaaacatctttctcgagcattccgcaatagattcttagaaattcattttgatgacattcctgaaaatgaactggagacgattcttcataagcggtgtaaaatagccccttcatatgctgcaaagattgtacaagtattccgcgagctatctcttcgaagacaaaccacccgaatttttgagcaaaaaaattcttttgctactttgagagatttatttagatgggcgtttcgcgaagctgtcggctaccaacagttagcagaaaatggttatatgcttttggctgaacgcgcgagagaccaaaaggacaaactggccgtgcaagaagtaatcgaaaaagttatgaaggtaaaaattgacactgatggtatttataaccttgactctatggagatcttccaggatatgagtttaaaagagggtcctttatctaaggttgtttggacacgtccaatgattcgtttattttgcctcgtatggcgctgtttactagcaaaagaacccgttttgttagttggagataccggttgtggtaaaacaactgtttgtcagattctagctgagtgtttgcacaaagagttgcatattattaatgctcatcaagatacggaaaatggagacataattggtgctcaaaggcctgtaaggaatcgttccgctgtaaattacagtcttcattcacaattatgtgaaaaatttaacgtacaagaaagtctggattctattgacgatctcattgagaaatttgaaaaactttcttcttctgaaaagaacgacaatttatctaatctgatcgaacgccagattatcaagtaccgctctctgtttgaatggcatgacggtgctttggttaccgcgatgaagcaaggcgacttttttttacttgatgagattagtctcgccgatgattccgttttggagagattgaatagtgttcttgaattatctcgtactcttactttagtggaacacagtaatgctgccgtatctcttactgccaaagatggatttgcattttttgctactatgaatcctggtggtgattacggtaagaaggaactttcgccagcgttgcggaatcggtttaccgaaatttgggttccaccgatggtcgatacagaggacattcttaaaattgtcgaaggcaaacttcataacaacaaaatcgagttagctcgccctttggttgaatatgcgaaatggcatgcgaatgaatacttgtatactgatgtgatttctattcgtgatgtcttatccgcagtagaatttataaatgcatgcgaaattttggatttaaatctggtattgtttaatgctgtttcaatggtttttatagatgcgcttggttctttcacgaccttttctttaagtaacaatttggcatccttacacgctgaacgtcaaagatgtttcgctaaattaaatgagttagcaggatctaacattatggcatccaaatctgccgatatatcaattaaattctccgactcatcattttttataggtgattttggaatacctttaggagattctgttgaatcggattcgacttatagtttacatacagatactactttaatgaacgcttccaaggttttgagggctctgcaggttctgaaacctattttactggaaggtagtcctggagttggcaaaaccagtcttattacagcacttgctcgtgaaacaggacatcaactggtgcgtataaatttgtctgatcaaacagatttgatggatcttttcggctcagacgttcctgtggaaggtggtgaaggagggcagtttgcttggcgtgatgctccttttttggcagcgatgcgtaatggtcattgggtgttgcttgatgaattaaatttagcttcacagtcagtcttggaaggcttaaatgcttgtcttgatcatcgtaatgaagcttatataccggaattagacaaggtgtttaaagctcatccgaattttcgagttttcgctgcccaaaatccacagcatcagggtggcggtaggaaaggcttaccgaggtcgttcatcaatagattttcggttgtttacgttgaggctcttaaagaaaaggacatgattgaaattgcagcatgtaactatcatcaagtaaatgaggattggcgtttgaagattatcaagtttatgtttcgtttgcaagacaatattgagaaagacattagttttggtagttttggaagcccttgggaatttaatcttcgtgatactttacgttggttacaacttttgaatgatgctccaaaatatacatgtgtttcacctgctgattatttggaagtcatggtcctgcatcgtatgagaacggttgaagaccgtgttagaacatgcgaattgtttaaagaagtatttgatatagattatgagccccgtactattggttttagcttgagcagccaatgttttaaagtcggacattcacttcttgtcagggatgtcgaaagacagaaaactttattggacagtcaaaatatacttcaatcacaattaccagttctcgaatcggtaataacatgcatcaacaaaaaatggccctgtattttggtgggcgacactgccacagggaaaacgtgcattctccgtttgcttgcggctattgctggtgctaaaattaaagaaatggctgttaattccgacactgatacaatggaccttattggtgagtatgagcagatagatatatctcgaaaagcatcagagctttttacggatctttctcaacaattattaaatattgtcatcaaatataggaatttcgataatattttccgtgaaacttccttatatacattaacgacgacttctttcaaaacacactcccaagcgtttacactgcttcaaaaagtagtggaccaattggatcagttaaagatacatgaaaccctagtacattctttaggtgatattcatgaaaaggctcgtaaactgcttgcagagttttcagcttctccagcaggtcggtttgaatggtttgatggctatttactaaaggctgttgaagaagggcattggtttgtcttggataacgctaatttatgtagtcctgctgtccttgatcgcctaaactcattgctagaacataaaggagtcttaattgtcaatgagaaaactactgaagatggacatcccaaaaccataaagccgcatcccaactttcggttgtttttaaccgtaaatcctgtttacggtgaactatcacgagcaatgaggaataggggggtggaaatattcttgttaaaagaagcccttaccgagattgacaagaagcaaatgtctcttctagaacctgcaccgatatcatctgctgtggatacgcttgcttcaaatatttcgtacatcaaatatgtttttgaaaccatgggtaaaattgaaatagatggtaattatatgtacattgcccatgctataatccttgcgttattttctccaaggcaactaaaacttcttcgaaaagttttattaactaatcctcaattttcgttatctatcaaagctgatgcagaacttttgcttaccttaaaaaatttggtacaaaaaatatattgcgctgattattttaatcatatggatttaaaggcttcgaggttcatggatatatatgaatatcccgtccagcttcgtgaagttgtaggcctgatacaaacgattaatgattttcaatcagtcatattaacctcccatttggagttgcctgagacatatgcatcaggtttattgtttgtttctgcacatgaaattctcgacttaacagaggaagtcaaccgcttagcagtttccacaagcaatagtacctaccttctcaaaagtgcgtctgctgtttatcataacgtttcttcttttaaagggtctactccttctttgtggaacttattaaatcagttttctaaatttttgattgaaattgcaagtgcaaactcaaacattgtctataagctatcctacgacgttattcgtcattttctcaaactagttgtattgtggaaaaatatatacgtttggacaaatgttcccgattgtgatattagtagattttattgttacactaaaatgttaggagaatggatgtttactttaacggaaaaaacaaagctattggagtcatttttacctaaggattcgcttgaaaaattttcagaattgcaaaacttgtctactgggttacacatgcaagcaatctgggacaaatggcatgctttcgttcctcgtacatatgatcaatggtcgctttggaatacagttgataaactattgacacaatatgttaatgccaacatcccatcaatttctatggaaactacggcatgtgaagttgtaggaacttctttatcactattaaacaaagttctggttgaaaacgaagttggagacatttattcatatctcaaaatattgggtaaaggtgttaatgagctaaaatcttctaaacaagttattttacccgaaaaccttgttaatctttttaactgtttagcttcattggatttgttgcatatttttatcaaatatactacctcctcgttctttctaaccgacgattttgtgcgttttatacgagtttgctttcattccagaatttcaggtaatctgctgacgttactgcatggaattagtttcgatagcacgaaagctgtagcaccagttttaacctacttcgatttttgctctttaaccaccggcaacatcttaggtcgtattgcacttgcttttaccagcattgatgagaatgcaaatttggagtctgcaaatatttttgagcatgcacgattggccttacttcagcatttcatggatcactcttctttattagcggaggactcatccacaaaaatgaatttgatattgctacagagatatgctgttataatttcaatattcttggatcaaggaaagtgtgaaaaggccaatgaccttataacgaagctctctcttccttatgaggaattagctgaaaactttgtctctatattagaagcttgcaaagcatttttggttgccaattcagaattcatttcttacacgtatactgagcgttttattcattctttgagatttctgaaagactcttggttaagcagcaaccaacagaaaatgttgaaaaatcaaggaatggcttatatttattttgcttctggaatgctgttagtatatgttccagacaaaccctttgatcctgccctgcttcctttgctcacagtagaaagtttgagacattaccttgaaagtctctataaggaaagccaaattttagaaattgccgagtccttgaattcaggaaaagttaatagcgtgatgagacgtttagtttcgactgaaatttcgaacacgcctaacattgattcttctttcagtaccgtgtacagatcactgaatgagagcatagttcctctttatagtgaattggaatttttcatgaagtctgttgtacttaatcagtacatatttgagctagcaatgcggctttctaaagaatcaaatatcgctgttgttgaagaagctaaatcttttgtaacaaaatggaaggcctatattgaaagaatacgtgaggcttatcctcaatttgttgatgtttacgagctcattctttcattcataagtttcatgatatacggaatagagctgcttatgttcgaagctaaacgacgcttggatgaacgatctcagatactctcaacgcttattttgacattagtggatccttcaagttttgcacgttcgcttagctttgatgatgtttcaaatttaattgagcagatcaaagtgcttgatttaaatgattcaatcagatttgaaatttacttattcttagcttctcgcttatgtagtgaaaaacagcattctagtgatactcattcgttggccaattctttcgtactattagctaatgaattttacatccataatgcaaaaattaagcagaaagagctcgaggagatagaagaaaaaaacagactttatcgacagagagaattcaattttgataagaatgattacttaaaagtgttcattaattacgacgatgaagttgaacctgaagttgaacctgaagtcgtaattgaaagaaaaagattcttacaactgcaattcgctttttggtctctctataacgaaatatattctgagaaaatgaacgtaataccgttggagcagcttatgaataccgggtcatatcttgctaagaaaattaaagttaagaatccagacatgattgcttcatcaggttttgatattgttagcgttgtactcatgatgggtgttaaatcgactaacgaaagacagtattggaccccacctgtttacaatttttattctgatccgaacccttcaaaagctatagaagttcgcgatttgatcaaaattgttgaaagccgagctatatctttaatcaaaaactggcctgagaattttgttctaagaggcttaaaagatgccattgatgctatacttaacttaagtccgttttctcctattgctgaatatctatcaaaacttgaacgagtgtttcatttactatctgaatgggaaaagttggctagtagagaatattcgcttgctaatgaaatggacttgattaagaaaaaaatcattgattggagaaagtttgagctttcgaattggaacaatttgcttaaattagaagaatacaaactttctgagagggtttatccaagattgtatagtatcctgcaatttattatactgaagcctttctttgagaatagcaaattcactaagcaaaatttgtgcgaatctgcctctattatagttcagtttatcaccgatttgactgttggggagtttcaactttgtttgaaatgcttgttatcattttctcaacatgctgcttctttaagaatatgccacgggattgatgcaatgctcctaaatatctatcattactttgagcaatttttatccaaagtttctgaggcaattcatacacaaaaacagtcgcttgaaaattcaatcaaagagcgaatactattgatgagttggaaggataccaatgtttatgcgttgaaggaaagtgctaaaaagagtcatgctgagttatttaaagttctacataggtatagagaagttttgagacagcctgtttcttcatatctttcgcaaaaacatgattgggattccttacttgacactgaaaacaattcagcaatgtgggttgccaaaaaagtaaaccttagtccctcatatattgaaaaaatggatacagaaattatgaagctggttccagtacggttttctaatactccgactactctaaggttgatgtggactttatttgctaacgttgaaaagcctggttcaactttcactaatatggtttcaaatttaattactgatgcccgtgagctgatgaagctcacaccggaaaccattaacgatgataatctgtctgaaattaagcatttgaaaagtcgaaagcatttacttcttactgaaacattcaaaactctaaaggcttttggcttgcaataccgtgttaaagctggtattgaggaaaatcttagtaatttacgaaatttgctggcagttattcctacttttccagttacttcattgagtatagaaaaagttgatcgttcactgatgaaatcattagactttattcccaaatttcagacactagctggtcatcaacataatgatttaagtgttcctgaagttcaaaaaggtgtaggtttatttaacagtatgttatctttgcagttaggtgagcgtgcacagctagtcgaatttaccaatgaattattggccttaaaaaatgtttattcagaagttggtgtgaatggttcgccgttggaatcctttaataattcttcatttaatgaggtgagtagtctgggatatgatcacgatttcgaaaatcgagcgcaggctgtctctatgctttgtcaaatctatgccatagttatacagaagcactcaagtatatctcccactgcttcatttcaatcgatcgggcatgaacttagtcgattcgccgacctgctatctaacaagttgtttccttcctcaattccgctttatgcatctgctgataaagtttcttcgattcgtgatcaacagaaaggaataaatgatttgattgaatactgtcgcaaaaaaaggacagaattgccggagttgtcttactgctttaaacatttggttagcttgcaaagtttgaagtcaatatccagaacgcaagtggatttaacaaatgacgagtttttgaatttgatgaactttgttttaaacttatttgatagtttgctttcttcaatagaaaccgctacaaagaatatgcgaacattcaaagaactagccgaaacgtctagttttatcgaaatgagcagttgcttttctaaagttttgcgagcttttaatttaaagtttcagtctatgaagctgagttctttgaaagagaagttacgttcttcttctgtcgataaaatgagttgtcaactacttatgctttttcttcctgtttgtgagcagtttataaacttagcggaaagtgtgctagattactttataaatgttcataactcaaaccttgattcgctatccaaaatttcgacgttgtttttcatggttgcaaacaatggtttctgctcgcctgaccttccacaagaaggaaaatcaaatagtggcgaattagagtctggtactggtctcggttccggtgtgggagctgaagatatcactaacacgttaaatgaagacgatgaccttgaagaacttgccaacgaagaagatacggctaatcaaagcgatttggacgagtctgaagctcgagagttggaatcagatatgaatggagtaacaaaggactctgtagtatcggagaacgaaaacagtgatagcgaagaagagaatcaagatttggatgaggaagtcaatgatatccctgaagatttgtctaattcactgaacgaaaaactctgggacgagcccaatgaagaagatttgcttgaaactgagcagaagtcaaatgaacagtcggctgcaaacaatgagagcgacttggtttcaaaggaagatgacaataaagcattagaagataaagataggcaagagaaagaggacgaagaagaaatgtcagatgatgttggtattgatgatgaaatacaacctgatattcaagaaaataatagtcaaccaccacctgaaaatgaggatcatctcgacttacctgaggacctcaaactagacgaaaaagaaggtgatgttagcaaagattcagacttggaagatatggatatggaagcagctgatgaaaacaaagaagaggcagatgctgaaaaagatgaacctatgcaggattttgaagatcctttggaagagaacaacactctggatgaggatatccagcaagatgatttttctgatctggctgaggatgatgagaagatgaatgaagatggcttcgaagagaatgttcaggaaaacgaagagtctactgaagatggagtaaaaagtgatgaagaattagagcaaggtgaagttcccgaagaccaggcgatagacaatcatcctaaaatggatgcgaaatctacttttgcatctgcagaagctgatgaagaaaatacagataaaggcattgttggagaaaatgaagaattgggtgaagaagatggagcagcagaatctggagttcgaggtaatggaactgctgacggagaattttcatcagcagagcaagttcagaaaggggaagacacttcaacccctaaagaagcaatgagtgaggcggatcgacaatatcaaagccttggtgatcatcttagagaatggcaacaggccaatcgtattcacgaatgggaggatcttactgaatcgcaaagtcaagcatttgacgattctgaatttatgcatgttaaagaggatgaggaagaggatttgcaagctttgggaaatgccgaaaaagatcaaattaagagtattgatcgagatgagtctgctaatcagaatccagactcaatgaacagtacaaacattgctgaagatgaagctgatgaagttggagacaaacaattacaagatggtcaggatatttcagatatcaagcagactggtgaagatacccttccaacggaatttgggtctatcaaccagtctgagaaggtttttgaattatcggaggatgaggatattgaagatgaacttcctgattataatgtgaagattactaaccttcctgctgcaatgcccattgatgaagctcgtgatttatggaataaacacgaggactctacaaagcaactttctattgagttatgtgaacagcttcgattgatattagaaccaaccttggccactaagatgcaaggagactttcgtacgggtaaacggttgaatatgaaacgaatcatcccatatattgcttctcagttcaagaaagacaagatatggatgcgtcgtgttaaacctagtaaaaggacgtatcaagtgatgatttccattgatgattctaagtcgatgagtgagtcgggcagcacagttctagcgttagagactttagctttggtaacaaaagcattatcattacttgaagttggacaaattgcagtgatgaaatttggggagcaacctgaattgttgcatcctttcgacaaacagttttcatctgaaagtggtgtacaaatgttttcgcattttacatttgagcaaagtaataccaatgttttggctctcgccgatgcttctatgaaatgctttaactatgccaatacggcttcccatcatagatctaactcggacataaggcagttagaaatcataatttcagacggtatttgtgaagatcatgatagcattcggaaactgctaaggcgtgctcaagaagaaaaagtgatgattgtgtttgttattcttgacaatgttaacacccagaaaaagtcgtccatccttgatattaaaaaggtttactacgacactaaagaagatggtactatggatttaaaaattcagccatatatagatgagtttgcttttgattactatttggtggttcgtaacatcgaagaattgccgcaacttttgtcttctgcacttcgtcaatggtttcagcagatgagtaatacttaaattgtacaaaagctttgcagttaagacttgcagaaaaaaataatcgggttaggttttgggattatttttggtacttatacatactacgatttaataaattaattaataatagaaattcattggtatggaatttagtgataaaatttttagtaccataatgtttctgtgaaaggagcagcattactcacaatcaaagttagtgtattttaattctccttttaaattagtcataactaccaaaattagtaaaggcttgttattatgcttagattaatgagtttcagcagaagtttttcccattgcttgttgaaaccacatttttttgtaagctccgccgtcacgctttattaactcttcgtgtgtgccagtctcaacgattctaccattcgaaatacaaagaattaagtctgcattggtgatggtggagagcctgtgagcgattactatagcagttcggccagatgcaagtctattcaaggctgcctggatttgtcgctcagtatttgtgtccagagcagaagtagcttcatcgagaaggataattgaaggatcttttaagatagctctggcaactgctacacgttgtttttcaccaccgcttaactttaagcctctttctccgacacgagaattataaccatctgggaattgtaatatacgatcgtgaatttgagcagccttagcagcagcataaatctcctcattggtcgcagaaggtttagcatatttaatattgtaaagaatagtatcattaaaaagggtactatcttggggaactacacctattgaagatcgaagactagacaacgtaacatttcgtatgtcttgatcatcaatggttatggatcccgagttgacatcgaagaatcgtaaaagaattctcataattgtagatttcccaccacctgattctcccactaacgcaataacttttcctggttgtgcaacaaaattgatatctgataaaacaggttttcgtggatcatatgcaaatgaaacatgagagaatattaccttaccttgagtgactttaagatctggggcatttggtttctccaccacagtaggtttctcctcaaaaatttcaagtagtctttctgtatcgatgatgctattttgcaatgaacgatataaagttccgaaaaaattaagaggctgctgtagctgaatcatgtatgtcaaaagtatgacaaaatcaccgacagtgttaaagccgaatgttactctataagcacttaatagacaagcaattgccaagctgaatgtaaatattccaccttgaacgatatttaaaaaattaaggctaaatagtaccttccgctcttgcttaagataaatatccacagcatgaccgtatcgttcattttcaaagtcatctgcatcaaaatttttaacggtttcgaaattcataatcgcgtcattttgcacagcataactctcgcgccagctattaaccatctttcttctagcctcggtacgccaagatgtaattttgaccgtaacgtaacagtaacaaagtgtcataattaacacaataagcgtaaaataaatgtcaaacttaataaaaaagtataccatggctactcccaaatccaacaaaacaggcccaatctgaaacacaacttgttctgcaaacgtattcaacgaacttcctttagttaaggcggtcaaaacctcaccagcacgtttattcaaatgaaaatcgtatgacaggtttagaacatgtctcaaagccttagttgatatcgctctataagcatattgagagacaggaacccataagaaagatcgaagagaaccaattactcccatatttccttgcaaaaaacgatagataacgaatagaataacatcagaccaaggaattttctcactatgttttgtgagcttttcagttaacacacccagttgtcggggagcaagtatgttaacagctcgccccaaaaagagtaaaactatgcaaatgaaaatctgaaactgaagtcggtaatcttttgtcggccagagatagggaagtaaagtagagaaagaacggaaatattctgcccaagatttatcactaggttttttcgatgttgatttgagtgtaccaaaattcgaggttgatgccgatacaccgagctgaacggtcgagggattttgagagatagcattctcattaacgtttgactcttctgttaattgacgctcctcaaaatccaggggatcgtgcgtatgtctctttcgtctataagttagatatatagctgtagcgaaaacacataagaccaatcgggctacatggtccgccaatacaattccttgaaatgtttcatttggatgaggactgtagacaatgaaaattgtttcaaatacaatgtctatagcccaaacgtacaagacgctaaggcggtaggcctttagtatggaatccgcattttttggaagagctttagaatctgcgcatgagataagtacaattatccaaaataaaaggaagagaattaaacagacaacagtggttttacagggccaccaatttggaactcgcaatgcgtagatgacaagattgctgatatcaacgacctaaaaatgaaattagcaatatgaagcgaggttaaacaattaaacataaacatttttctttcaaaatatacttatatatatatatatatatattttttaagaaaaatgcttgaaatacgtacgtaggttaatgcaattcccaatatccaccaggaaattattcctataggttctttgccgaagcgatttttcctacgataaggatcagaagtagctttccttttctgcagtaagttcaaggacccaatactaaaaaatccgacatatagaaggaccagctcaagaatattgaggcgtgggctgttgtaacgtagaaccattacaaaaaaatcaaaaaagaaatgccagtttgattaataaaactttaggtaaaagtaacttgataattttaaattgttactgcttcaattgctaatttggtttgactgaggttaagtggtgtagaggttaagagtgacaatggtgaggtaagaatacctcctatacggtaccaaactaccccacttacggagcctttcgaaagcagaaaatcagtatgaattttgtatattttgtttcaacttttttttttgttaagagtcttaacctccttacaagatcgtagcttaaggcatacatccttcatcggccacgatagaggaacaaataatgtacttacttgtattgaaagctttacaaatttcaacggcatagtaacaacttgtaaagggtcttcttaaaatatagataaaaggcggctgaacttgatgttgactggcaatgttgggtatacaaatctaaaattgatgagcttgaatgcaataacctagtatctggaaccttcgaaaagttttaaagaaacacgtaacaaatcctttttatttgaagaggctttcaagcaaaagttacaatatttaattgcataacacaccttcaaactctgactttcgctaacggcctagaaatgataaactcattaaagacttctattttttaaaattaatatttttaattaatggttgaaatattcagaagaacttcaaatttaactacttttaacttactgacatcgttattttctttccaaatttttttatcagatcaagcctcaacgtacatcattgtgacagaatacagtctacaccaatttatgaataagcattaagtatagccctagccgaacttttttactatctaacgaaacgcatcacattatataataggctttatgaagctaaaaccttatgaaccacaatgtcgataacttcaaaacagcaacaatcatgctagaagtggacgggcaatttgaagcatctaacacagtatacgtaattctttaacaatatttttgagtactcttcgtaaggttgatggtattgttgccttggatcagtatttgcattgctcggtataagggatatgggggatacctatctactcttaattttgctctggcagtttaaaaggcgggggaaggctggctaatcgtaaatcttgcacccaaaaagtctattggctctcgaggtttttattaaaggtaatttcaaggcttagaaatggctgtctaccagccctttatcatgactgtactattcgcgaggaattggtggtagtcactgtgcagtcataataagaaccgaataacttaaagggacaactatgattggacgtaagtaattttaactattaagcctcgctaaaataagtacattacgtcgactttagcgaagagtggcagcggatttaccgtcgcattcgtcgtttgtgggccatcctgacgttttagagttgcaactttgtgccttttgattcgtccttctatttaagaaatgtgggacagctttgcggggaatgcttgcgaaaatagcaatgtttacatttgaaatggtgcttagctgttacgaaaacttgacacgatatgattttttttatctataaataagtgtccctctcaccagttttgaccatcgaatacagcatttaaatcgatactaattttgaagcgaaactcatcagtctaaagcactctatattttgaagcatccatattctcactcaattctttttttttaacactataatggctattatgcacaaaattggctgtgccggaagtgaagttgagaccgaccgtgttcttgaaaaagaccaagcaaacaacggtcacttcgttgatagtgattgctgctttcaagagacaggaagtactggcacggccaacagcatttgcactttaaatgattcagaagatgataacagtagtcttaattcagtggacaataatgaatgtaccaaccttgactgtggtggtaaaaagcacaaaaatctttcacctaatccttctttccatgtaaacatcaatgccgcagaatttattccgaaatctcataatgggtatgctcctaaatcaatgaatccccctcccgaacaactcgattctccttgttatcctcattttgaccaggactcttcttcagtcatttatccttctccaccttcaacctattaccccaacatgtatgtttcagcaaacaccttcataccgatgccctatgcccactataccgacaatatgtatcatgcaaaacctgtaaaccgtccaaatttcctacctcgagaaggtactcctcctccgtttgcccaacaacctgcggagcaattttcaccattcaattcagaatacgaatccttgttagattttcgtgctttaatccttggtaacttgccagttgactacaaaatttccgaattactttcgcttatccactctggaccattagagaagattcagtccaaccctggaaaacgcaggattataattacatttcttgattctgctgatgcctttttcttttatgaaaggtaccatcctcgtggattcatttttcatggtaggccactcaaattgacatttgctagaccttctcctttacctgaatcgattcaaaatttttgctcgaacactgcggccagccgtaatgtgttcatcggcaatcttccttcttcttatcacgagaaggaaattgaagaagcgtttggtaaattcggcaagattgagcacataaaaatcctctcgaaaaagaatattgcttttgttcactttttgaacatccgcgacgcaatcaaggttgttcgtaccttatcttgcgatcctgactatcactcatggcgaatattttttggctcagatcgctgtgcaaatcatccaccttcatttgatgaaaggtcatgtttcacttccaagcaaaatccggataccacgtctgaccgttgcaggcagcaggaatcaaaagacaatggaaaccgtactgtcttccttggcaatctccatactaagactaaaggacatgaaatatgcgatctaatccgacatggagggttacaagacttccactatattcctgaaaaacatatatgcttcgttacatttataacgtattcggccgccaacgctttccacgactacttggctgaggaagaagttttattacacggtcgaagaattaaagtaggatggggtaaagaaagtggacctttgcccagagttttagaagattctatattgatgggcgcttccagaaatgtttacttcagccatatatcagattcacttactaccgaagagttagagctcatactgcgtcagtatggagagattgaatcaattaaatatttaaaaaatagaagttctggattcgttgcctatacaaatatatctaatgccatgaaggctgtcaatggcttgcctatacatcctttgttcaagaagagcaaaatccgctatgctcctgatagatgcgaacaagagcttcaaaagtctaaatccaactctcctatccaacagaatgttccattgcagcaatttattactccaccgttttcatatcctgtagcttattgtccagcaattcctccaggttcggatccaatattaaattttggtatccagtatcagccctttatcccctttacagccgttccctcttttcctttcaactgcaatgttccgaactatcctcaaacatccgaccacgaaaacgactagttccaatactcgcgaagtaacttttgttcatcagcaagtcagtatgtttccatttatttttgcttattctcaattctacgggtattcactcagcatgcaaatttagtttgtaacagagactcccaaaaacttaacactaactcctctgaaaaaaacttgaaaattgtccaaacctaactaaacattgccttaaaaaaatctaaaattccaaaaaaaattgaaaaagaaaaaattcagaaaaaaaactctttttattcttgactctaattaaaccttattactgaaagtttttgatttatcgtttttacacgttttgattgtttcccacccaaatttgaaatttttttgctttgtcacattactactcttccgtgatttccaatgtcttcttttaaattatgtaattttttgtctttaaagaaaaattaccttcaaccttctgagcagagttttattcattcaatgtgtcaattagtttttcaaaccattcttctatcactaagagaagccggtctgtgaacttttacttttcttacctattaaagattacttacttcttgctgatgaattcatgaacccttctcgatccgttacttcatgggtagtttgttcatttaccattatccattttttactattaccacaatattttcccatttgctactgtttccgttgatgccggttttaagctaacccaccagccaattttgcatttttccagcttgctatcattaaaccaactattctcacttatacacattatcattgtactatccactgacgaattctttactatttctcccgtttgattacagctcagctttccagaatcattgttattgttcctcgtcatgatcactattatcctttgttcacaaccaattaattgactatcttcattctatcattccatcgaccccatcaccagttcgtttaccatttgctttcttgatagcattcagcttgatcacactaattttatttttttcttgagcttccatatttatcgcttattcttgcttttactattctaggattaacgtactcaccattttcttttctttcaaagctcaattattgacgttactcccaacactttgcttactaccgttttttgttatcataatcgttctgtcatttcattttgtcatcactatccttgtccttattccgttttttttgagatttttgttttatcattatcattattcgagtccgacaccttctttgtcatattttcggtttactttgcccaattccttccatcaatacattgtttaattatattttccatccatcattgctgttaattaattactattacgatgattaggtctacggtatcattatcatcataatgatcaatgaataatttcatattttgtttaattcagtctaaaaaaataaacgaagacatgccttctacttatttgatcccatgagcaactttagccatcgtatatgatcctagacacttagaatatgcaaatcattaatggctaaattcataattaagagctttttgcgtttggatactcttttaataattgtatctttataagtaaatagtaaagtaagaacacctcttagaaatatatgtaatgtaagcacagttagaaagctgagattaaatcttagaaaagtaaactactgaacgcaagattgatttccttcctacgctttgaatgtttccggtgcactagtactgtttttttaaatatctaaaaatttaatgaaaatcagaaatctttagtaaagattgaagactacaagatttggtaaaacagccaaacctcaatatttattttgttgtttacctttttgaacatttagcgagactcgcttcactgccatacaccaccatatgaagggtatgattcttatgtttatccctcaacacaaatcatccttctaagtgcttatattagtgccaaagttggaattggcacgatgtctattgcatctgtaaaaacaccgtcttctttgagagaagctcaaattcgtaagtagtgttgctaataaaactgtataattctcagtaagcattgctaatatgaacctttagaatctttagaaaaactgcttaatttgaaccaagacgtcaacgaacttgaatcaagccctcaacatgcctctaattttcccatttggaaagttttaatcttcgataaggcagggtcggagactatttcttctgttctcagaattagtgatctcagaaaacatggcgttacggttcacatgaatatcacttcgtttcgtcagcctattgctgatgtcccagctatttactttgttcaacctactcaagaaaacattgagctaataatagaggtatggatttctcagtatcataattttcaatcaattaatcttattgtcggataccaaatacttttttgtattacagttcagcaagctaacatattttaaaggatctttcgaagggtctttacgaatcagcctatgtctgtttttcatctaccatttctcgtgctcttctggaacagtttgccgaattggcgtcgaaaacaaatacaagtcacatgattcatcaagtgtatgaccagtatcttaattatgttgtgttagaaagtgattttttttctcttcaactgcccaaaatctttcatacgttccataacccgtcttcagatgaggctctcattaattcacgcgttcaggatattgtaaatggtctcttttcagtgatcgttacactcggaaccattcctatcattcgttgcccacaaggatcggctgctgagatggttgcccaaaagttgaatcaacgtctaaaggaccatttaatgaataccaaggatgcttttgtttctgttaatccaaaaccaaggccaattcttattttactggatagaacggtcgatttgattccaatgataaatcattcttggacttaccaagctttgattcatgataccctaaatatgcaactcaataggattaccgtagagtcagtcgatgatggaaaaatgacaaagcggttttacgatttagatggaaatgattttttctgggaaagtaatgctagcaaaccatttcctaaagttgccgaaaacattgatgaagagttgactcgatataaaaatgatgctagtgaaattacccgaaaatccggtgtttcttcacttgaagaagttaatgttgacgcatttgctgattcgacttatttaaaaagtgcagttagcttgctcccagagcttacagctcgtaaacaaatccttgacatgcatatgaatatagcaactgcattattaaaagctattcaagagcgccatttagatgacttttttcagttagaagataatataactggactaaacagaagtgccattctcgcttgcatcaataacaaggaacaaggaactcccgaagacaagctacgattttttataatttggtatttaagtgttgattccgtaccggcttctgatttgcaggcatatgaagaggcgttggttaacaatggctgtacattagaagcattaaattttgttaagaggtatactgattgatgttattggttttttctaacttatattagggttcgtgaaataactaaaatgaccatgttagcatcttctaccacaagaccagctacgggtcaaacaggagataatttatttcgtggatttagcagtctttccacaagggtaagaatagtttgacactttttcaccttaaagcacatattaattgtttttagtttaccgaccgctttaaagaagccggtattggtggccttgaaaatattatttcgggggttagaaatctgattcccttcaggaaggatgggactattacatctattgttcagagtctaatggaccctggctcttctcctgcctccaaacaaacagagtcttatctattattagatcccaaatcagctcgtgctattactgtaaacaatgatcctagggccatgaacaaaagacagacttttagtgaagcaattgtttgcgtactaggaggtggtaattatttagaatatggtaatctggctgattgggcgcgtgaacaaaatcctaagaagcgtatcatatacggtagtaccgacatattatcgccatctgaatttatggaagaaatggcttctctatcttaaaaaattatttagttttattttttggccatcatgtttgttcagccaatattgtatgaaataaatgatttactcttaatttgatacatgacttttttgtcgaatttgtgtagtccatcatcgtattgaaaatttggaaagcatcaatgttcattatacgcaaatcgcggttatttgtaaacgacatatactttcagaccaagagctgagggaacagaaaaaagaaaatgtaattgctgttctaaaactcaaacaaaaaaaaaaaaaaaaaaattaacaaaaaaaaatttcaaaaacatataattcataagattctcagttataacttaagttagacatggcttaaaatatgtaagttgtgaaaatcttcagtttatatagcattcgagtaatttggtatcgaaagagatggattttgtaaaacgtttgatgaagcatctgatatagaagatgacaaattagaaaaaattgaacttaattgcgaattcgaagtagctgagtatgcattcgtgttattttcagaaacttgctgcactaaaccattaaatcccaattcagttgttgcttgagtgtcagacgagactagcttgatgtgagcaggaggacgagaatcatcgaattctcgaataacaggcaaatccaaaataatgttaaaagtggagatatccttactttcattcttctcacgttctatttcgctagtggcttccggggtcaaattccgttcattccctccacatttgtatccacgaggatggatttcatctttagaaatttcaaattttataggaactggtttgtaccaaataatttcgttttctacatcgtcttcaacgtggctaccaaacgctacacgagcttcctgtctgtccatatccctagcatttccatagatgtgtggtgttttgactgacgcggcaccttcctcattaagagattcaataaatttgacttgaacaagatcgttatcgggcttccatgaaacggacttcttctttctctttttgtttcctgttttctcatcattagaagcaggatcactactgaacactgcattctcagcttgtaaagatgcaatctcctcactttgcctcgacgaagaggaacgcttcctgaagctgggcaattcctcacgattattactaacattttctgaacttattccagaatccttgtccttttccttctcccgtcctttcaagccagccatgatagaggaaagaggagtagaagggttggtttgctgttttgtcaaaggcgcttttgttgaagaggaggccgaagttggttttgtagagcttgctaaatttttaaagaaggatgttcccgatatgctggttaccttttttttagatttcgaattgcttgatttagtagttgaggaagcgcttggtttattagacgcagacggggccatcgccggaccagccggggccataacgactgcggaagatgaaacagtcgaatcgttcttcgtagagctcttctcattttctctattttgttcaatagtaaaacttttctcggccagttcagaaagattttcagcaagctggcgtataacggaattggtagactttttttttacgattaaaattggtttgccaaacttaacctcagctagcttctcagtcgtaagaggaagattagctagcacgagcagtattaaatgaatgagttcgtcgtgtttagaacgaatagctgatacaaaccagttacgtagtttaggaaggaacaatttacgaccgccgtcaacaagttggctataaatactattccccactttgcttttaagaagatctagaaaaactaatttttgatcatcttgggtgatattgctcatgagattaacaaggattgcagcacattcttttggagcttggacgatgttaattgggtttaaacactcagtcagagtaaggcgcaaatcttctaacggatcagaggaagaaattttttgacgagatttagattttaatcgtgcaagcatttgaacgttcacgtctgattttgatgatggtacttcatgggaggcggtatttaaactaaggcgcttcgttagtcataaataaatttttaaggcaaaataaacttacgaagatcctgaatccggattccttgaagtatgacttggattattaacatatggattggctgagatagaggtatgattagtattttgtgattgagagtcattggaaggagaaatgccaggagaacttggttccttattagaggacaaggattgtgatggggagccagtttgcgaagatccagaagatatgagtgatggattggatgaggcaactaagataaatattagcaaattgaacgaatcaaaaaagaaaaagaaaaattgagaacataggaaaactcagtatagtagagataaaaataaaaagaatgaataaacaaaagaaaatatacctgaaggcattgtagctaacaatgaagcatctttatgtgacagaggtgactgggagtgttgaaacacatgaggttctaagcctaagggcaacaattagtagaattctaagagaaaggatcaaaaatagcagagaaaaaagagagaacaagcaatcaagacatcactcgctacagcccgtagaggcaaatatttcaaattattgaccaactctctatccccgctttaatagcctgcataccagggaaagcactcattaacttttcatctaagttttcttctaaatcaggactcagattaataaattccggttttccactatactcattggaagtatgtggaggattttctgacgttttacttgtttgtctatcactcgacacatttcgcacggaattccaattatccattaattaaatatcaaagaggttcaaagtaatactccgaataaattgaacctttcagaaattcgcactgtgccgatttaatcgtttcctgaggatatacgctgagaaaggatcaacgtcgactactattcaagtaaggaaactgaacatgcaactttgtgaaattcgttggagttctctaaacccttcgctacaccatcgtgtatattaatagttaaaactaaataaaaaaatataattttagtagatttttaattttttaattatattgacaataatagaagacttaagaagcatttttggcgtgtgggacttggtatgccaaatggctttccagctgtaaacaaaatgattcaccgtttttagatcggatcaatcttttcacgaattccgttagaaaaaattaagaataaaaggatattatactcttatttttttcttcattctcttgtgattttgaacccatctctttttcctcatacattaaccggtcttcatattaacgtctgttattagatagtaaacataatttatacattgttttttttttttgagagtaagctgtgcaccagttctatgaacggagtatttttatttattttttgcagaatggaacaaattaatctatatactaactgtggaatgtatgaatcctttagacaaaatgaatgaaaataccttctacaaattttgaggaatatatagtaggattttcaaataatttaaatattgagacatacaaaaattaagaataccaatcatttgttctcgtttcataattcacattttgtgtctataactttctttattagcttttttctttatcacactaaagttgacatttctattgacattctttatgaaaagaaatttgcaaaatttgatgtacagatgttttaacaattttttttttaaaaaaaaaaggggggggggggaattgctttcttcataaagttcaactaattacaaacaagctagcatagtattttaaatagaattggtttgtatttgaattaaagtaaagataaaggaaaataatactctttatggactagttcctcgatgtcgcagctgcaagtcgttcttaaattgcaaaaaaaaattgcatattaactagtctttgatttgattctcgtttacattaacataaacgtataaattttttttttcttaacggttttctttattattaaaagaaaggtgagcatatataatcaacatcgtcatgcatatagataaatgggaaatttcagttatcagagaaaacccgcatgaaaagtaaaaggactcaataaactcctaacattcagtcattcgattatttcatatcaacaaatgtattatggttataacaagataaatacttaacgagtgaaaccaaaatcttctgtaaaccgttgataatacaatggcactaaattcatcaattcataaatgtttcaacagaaaatggcggtaattaatccggacactagtatcttcatgcaaccttattcgctaaaagaaaaggtaaaaaaaataaaatgtgtctttgctattgagtagatttgttcaacaatgggtaattaagggatgcttgaaaacagcgtgttaaatggggagttacaataaatcatgcagaaaataacttgcacaccagcatagcacacaaatctaaaaatgggaaagatgacttaagatcatccatgccatgatcagctgttcgttcaggatgagaataaatatctttgtaaccattagatttcacatctagcataaaacacccgggcataacttcataaagttgtaactcaatataagcataagtattttttccttcccttttacaatgaggaatttcccaacgacttttaatggtatacatgtctgatcgatattttccatttactggttttggaacggtaaactgagctcctgcacgttgtaaagctcgatacacagccaacaaaatttcaggtgcatcgccccggcagcgaacaccaaaatgccatttgttacggcgactctttttgcgagtggattggctcgtatccacagcactagcagcatcggcaagagtcctcatttcaagtttatttttttctgccgtaggcacaaggacacatatgttactgtcaattgtttgtttagcatatgttggagggtcggagactgtccaacgcggtccttctaaagtaggatcgataagctcctgttttgacttcttttgcaattcagaagtatattctgaaaatgcgggtggagatacagatagaaaagaatcgactcgttttgatttggagagatgactcttttcttggattacttgattttcatgtagcaagttataagcctcttttacttcattattttcatctgaacgtaaagcttcgacaatgtaatcctccgagaaccccattgcctcaccaagcttgctgacaattcgtgaatcagcataagagccttggacctcctccataggacgtaaataatcgggtaaattaacgttgaaccaagggtcccgacgtatttcctgaattgttatcctctgcattggatctgcaacaatcattcggcgaattaaagattgtgctccgggagaaagaaaatcaggcataacataaacacaacctaaatacgtttagcaagagataagtagaaaaaaaagtggccaaacatactgttaacttttttaaacaaattggggataaattcatcgtcgaaaggaagacgacccaccaacatcacatagagaacaatgccgcaactccaaacatcgacttctggaccagcatacaatttcccgttgataacttccggggctgcataatttggactgccacaggacgtttttaggaaattaccgtctgtcataatatttgataaaccgaaatcagcaatctttacgttgagattgtcatccaacaacaaattttcgggtttaagatcgcgatgtacaattttgtgacggtgacagtactcaattgcacatataatttgttgaaaaaaacgacgaccctcatcttcagtcatctttaaaaacagtcagcaaatacataaattcgtgcattcaaatttgtaaacaagccttcatcagcaacatttcagatgcaaaaacaatttatctttttctatttttaaaaaagacaatcggataacttgtacattttgacaaatcaaaccaatccaacatcacttctgaaatttactgtaacaaaaactcgcaaaccgcaccacttacccttttcttttctacaatataatcaaacaattcaccacctgcatattcaattaccataacgatatctgtgggcgtggttatcacatcatacaatttaataatatgaggatgtcgcaaaagcttcaagtatgaaatttcacgctccacacgcatatgcatatcgcttttctttagcaattgacgggagataaacttgagagcaactttctgttgcgttttgtaatgagtagcgactacaagtacgttagtctctattctcatgatattaaatattagcaatcttacgcttgactttgccaaaagaaccttcaccaagggtttcccttataatataagggccgatatggcgcttggatatggcttctggtggtaaaactcttgctccatttcgcatggttgagttctccattaaatcaacctcctgcggttgcattatcagctattcgcttggcaaatccaatattgaaagtttattgataaaatctttttttccttaatagcaaggcttaaatttcagagtgtgagataaatatataatttggtagaaggcaaagccatagtatacatccttagttgtgtcacatgagatgatatgaattggactcgttaattcgtttaaaataacactatacagttttttaagccaccgttttactagttaacgaagttgcgtcacaatgcggaattttactcaatgaattaaaattctactacactattcattttaatgcaaactgcaaactcttatttaactaacccagttaactgttccaataaaatacttatacatgttacagtgttcgcatttcaatcttggctgtataagtaataacatgatccaagtatgattaagcagtttattatgtttgtaaagaacccatcccagatataatggaacacacggcgtaccccacagtcttcataagatggttgttaagtgcagcgttgtgtatcgcattataacgctcttgtcaaatcttcgttgagtttgtaaacaattaagtactggttgagttaatacaaaaaaaaggaaatgaacaagctttttattagaaaagagtcttcatattggatgtgatttctcagcaacatttaaacagtgatcatgaatataacgagcctgaactgatttcatttgtttacaaggcacacagactaattatcactgtttcttgcatgaaagtctttgctttgacgaaaaaatttaatattctaagaaaagctatcaatcaaaatccaaataaaaatttttttagaaagcagggaagtgttttcgaagtcaacaacttgtatgataatataagaatgcaataaaaatacagcgcaatttaccctgaacgaattttatagcttgtttggggtaaatcacaatcacaggaatgcttttttatttggacatcctcgtaaacaagtttcgtgtaaaaagcatctttgtaattcaaatagtaaagttagcatgtgattggactttatttacaaaattcatttcacacgatgaatagaggtttcttcattcacatgctgtctggcatcacgatctataggtgttaagcaaacacatttaaagtgatacttttttatataatagaatatgccaccataagttagttcgcaaatttttagctttaggtcaaactacgcaattaaaactttgcgctacgtgtagtagtacggtaaatttcgttgtggtttattaattatagtatacagatatcatgagtagcaattaattttatgtattgatatatgggttaaatcgttacccatcactaaactagcttataagtgaatgtcgttcctgagttcaatttggctctatttatatttcatcctaatttattaaaccacaaacattctagatgaacagttatccgcgattatcagtatttaaacgggtcttaaaactatattaacataaggaaacatgctgatacacaacgtaatgtattttaacgcagggtagtattgctgacactaatttgcaatgactttcttgttaactcgcgttttagtaaataaaaacattaatttcgtttaatttgaaattaaagcaaaaagacattatatgttttcctaaaatcattaatgatgtagacatatcaatgccttgccaactcgcgaattaacatgtttatcgtattgttgtcagcaaacgggataagagttttgcctcatattgcttggcaaacagtaagtctactttctttttgaatttaattcatgaacgagttaaaaattttgacacaaattcttgtttctgcagtacaatgatttgcttgtcgcacacattcacagtcattgtataactatcctcgtgtaaacatcgcagatctctacattgcaaacgtcctctatttcagtatagtataactctatctaatcctttgttcatttcaaaatgccaagtttgaggtatggattagggagatactctttcatgttgcttgttcaaagagaaaaatattaaaaatcgaggaaattcagaagaacaagaaaagtgtgtagtattgggaagcgtttgagatttataaaggtcctctaaaataaaaaagaacgactttaggattgacatatgaatttttccgaaaaactaaagcacattggaagatgaatatattctgataattaattaattgcgtaaaggatgtcaatgtaaaatgctaaggcagagagctgggttcagtcgtcgattttaagcctcgagaatcgccagctaattgaagaaagaagaggtaagtaaataaaacttgggaggcaaaaacgcagttgacaagaatttaaaaaaaaaagtgaagatgaagatgaagatgaacaatattttacttactatccaaacaatttaatatgacaatagcatacaacaaattacaatgtcatgctaggtttccctaatttttttggtattctgactttcaacttttctgatatgattgttgatttcccgacttgtttacgcatctcgtttctccaggtttttgtatcgacgtccttcatcatatgttaactctatcggggattagaaaaaaaggcgcaaaattaaacaatcaaagattgccgccatgcaatgatttcaaatccaatctacccacatccgctatctaaggtatttaccgagaaagaactcgacaagacggttatattatagagaaatgaaaagaaggttgatattagaggaaagaggattgtattgcgaatagaaatgatgtttggctcattctatatgaaactttgtcaatttacttcttcttgttttatttaagttgaaacgatttacttttctttttattcgttattagttgttttttatttgattttgttttggatagctgtagtcatatgtatgcttttttttcggtttcattattcttttcatttctacatttcttacagatagtttattttgcaaaatcaattaaaaaaaaacagttctgatgataaggataatacacttgcaaacaactggatcttagttatcaatggatcctcgtatccttaattttttaaaaatttcgtaagtttctttacgtaccgaaaaatagcgaaatcaggacaatagagaagaagaggttattgctttttgatggaaagtacatgatcaactgttttcctgtactatagaaaaattggtgtttattttttgtttcctctattttactatacgatttattgtgtttcgtttttactgtacgaattattgtgttttcgccaaacatgctctttgctctctctctctctcttttcaccatatcatttcaattcatctcttgataataaatgattcacttcagcataaatcatcactagcacaaaacatcactattaacacaacataacataatctcccgtattatcaaaatttctagtattagcatgatctctaatattaccacaatcttactgttaacaatctctagtataattcaaagttttaccatacatagctcaatgtatgttccaatatgaatgaaataaaaattagcaataatacagtagcgaaaaatataaaatgaaaaagcgaaagacataatcaatcgaacatgttcattccactatttccatcataaagcatcaaaagtattgaaggtcatatcatttttcaaagtaaaaaaaaatcaattacaaattttcatcaactacagcaaacacactttttctctctctctttccgtttttttatctcgacatcttttgcctgccctgcttaatcaatttgctgttagatagggattcgctctcatttccaacactatccatccttactagtttctcttaccttaacactcttttcctttccgttcaatgacgattctgatgatcttttcttcgttttcctagatttgccttactcctcttaccaagatcatatcagtgagcagtttaatgagtgattgtttgctagtttgtcctcgctttccaccgtagtatgttatttttgccattgaaataaattgtcgcctcgcttgttaccacctgtccctagataacctgataactagtagcactcctacaacccaatatctagagtacagaatatggcagacaccgatttcaggtatttataaacgaaatgttctttccttttgtcgaatcaaggttttatacctaaaaggatctgagtggtagttttattttttccctttttcgatttcttgttgttgcggtttattttttacaaaatattttcccaaaaaaaaaataaataaatcaaaattcaaacctacctactaccatcatctctaaaagctccagctgcttttttacattttctcgcaagactttcaattcacttgatactttgaaacgtgcaagaatttctctggtcgtgttattttttcgaagcatttccattgttcattcctcattcattttttacctagtgtttgttgctctaattgctataatagctgtctttctatactacatatataatagtaacgaatattttcatttttttcctcttctttatttttcgttgtttgattttgggtttcgttatttcggtggtgaattcattcgtgggtctcttgttttagtttcttaaaaaagttttaaaaaattgagcgtcgccaaattatttttattttcctttttataacctatttccttaatttattatcatttttactttttatttgttatttttgctttgctaatttcgctcttttccctttttttgatcgccttttcccccttcttcattcgtcgtcacattgttatcctacactttctcttgtttaaaagttatttgtttctctaaattaaacacctttgtctgcttctcttttctctccctttgctaaggttgcttctattcactcgataacttttcattcaatctcacctgctttttatctcatttcctctttttcaacccttgtgtgtattgtcgcatctatctcatcattatggccatacccattttagacgcactcacttcttctagtggaaagaagaactctgcagaattcagcatccattccactagcaatcctacaaatccagaagaacccaatattacttcagaagcagataatgccgaagatttggctgctttgggttacaaacaggaatttcaacgtggtttatccctgtttagtgtcttttcagtttctttctccttgctcggtttgcttccttctgttgctactaccttaccttacagtattggttatactggtacccctggtttgctttggggttggcttattgccatggtattcattatttgtatcgctcttagtatggccgaactttgctcagcaatgccaacctctggtggtttgtactatgccgctgccgttttggcccccgagggatggggtcccttggcagcatggtttaccggttggtccaactatatcgctcaattggtaggtggtccttccatcaactatagtactgcagcaatgcttctcggcgccgtcaacatcggcaatccaaattacgaagttcagaattatcagctcttcttagtaagtattgcaatccagtttatccattttatccttgcatccatgcctaccaaatacatcgccaaattgaatagtgtaggtacctatcttaacactctatttctcttcatctctatgattgtcattttggccatgtctagcaagaatcacggcttcaatgaaaccagtaaggtttggagtcatatcgaaaactacaccgactggcctgatgggtttgccattcttatgtccttctgtggtgttatttggaccatgtctggttatgacgctcctttccacatgagtgaggaaaccgccaacgctagtgttaatgccccaagaggtatcatccttactgccgccattggcggtatcatgggttgggttatgcagattgttatcgcatatactgttgttgatcaaacagccgtagtcactggatctgattctatgtgggctacttacttatcacaatgccttcctaaacgtgctgctcttggtatcctctctcttactatcgtctcttccttccttatgggtcaaagtaatttgattgcttcttctcgtatcgcttattcctacgcacgtgatggtgttttgccttactctgaatgggttgctaccgtcaatcctatcaccaagactccaattcgcgctgtcttcgtaaactttgtaattggagtgctaattctgtttctcgcctttgccggtgcaatcaccattggtgccgtcttctctgttaccgccatcgctgcctttactgctttcgtcgctcctgttgcaatgcgtgtctttttcgttaaagatgctgattttcgcaccggtcctttcaaccttggtaaattttctaaacctatcggattttgctcggtttcctttgttgctcttatgattcccattctttgcttcccttctgtcaagaaccctactcctgccgaaatgaactggacatgcctggttttcggcgctcctatgcttgccgttttaatctggtatgccatatccggcagaaaatggttcaagggccctcgtataaacttagccagcgagggcgacaactctactttggaaggtgtcgaactttacacaggttctgaagaattgccccagaagaaagaaaaggaatagttccattcctgcattactactttgggcattctcccgctttcccttttaaccattcacttaatctcgtgtctttccacttttcaaattctttttacgctttgtctgttttatagttaatgttgcattcgattgttaatcataatattcgcgagctttctccgataatttttttttttacatttcacaatcattgatatacgctataccaaaatgtgaaacatgtaccaagtacactgatacttgttttttgtgctataattttattcgtatttatatttaatatcgtttaatgctaaaaataaagcttgctgttctacaccaaatcgtatgaataggaatgttgtaaacacgtacaatataaattgtaatttacttgacaattgtaaactgtttcgaactttactaaagctttttgcaaaatcagatgtttaattatctagtaatttaagattgagactgcaatgttaaacgtttcttttaaactatttagattttcatagttacaatatcaaggctctatcttacatcacaattgtctgtagtgtccaaaagctagtcactactacattcaactattgaaaataaaaaattgagttaacaaaaacagctttttatccaactagttattttgatgtacgttataaaaaactgttaggtttcggtgtttacgaaaaaagcagtcacttttggctgtatggatacacccaaaaatttcgctgccaccgttacactcaaaagtcaccaaaacccatagtaacaagatggtgaagattttgaagccaggaaaggtatgtttgcgaggttttaaacctttagattaataaattgtggattaacttggctaacgaaacgttcaggttgctttagtcactcgcggtcgttttgccggtaagaaggtcgttatccttcaaaatgttgaccaaggatctaaaagccatccttttggtcacgccgttgtcgctggtgtcgagcgctaccccttgaaggtcaccaaatctatgggtgctaagcgcattgccaagcgttctagagtgaagcctttcatcaaggtcatcaactataaccacttgatgcctacccgttatgctctcgaacttgacaatttgaagggacttgtcactcctactactttcagcgagccttctcaacgctctgctgcaaagaagactgtcaagaatacttttgaggagaagtaccaaaccggaaaatctgcctggttttttactcccttgcgcttctaaacatcgggaacaggtttttgtatgctaatttatccttgcattaggccgtgcggttcaaatcttgttgctatgaatacacttttaaaaaaggattcgtaaactaatgttatcggtatatatttttgtatatttacaaagtgcatgtgcctgtaatttgagctcaagtaatgcggatgtttatccgttttttgtagagcaagtggcatttccgagtagtaatttttgataaggtctgttaaccttgctttaactgggcacagatgttgcggaatgcgatgtgatattgtaatacaaaagcagaatataaatgagtatgtagcattgctgaagattaaatgcaatgagagacatgattgtccgatcggatttgctgacgtggaagatgcaaacgttgctcacgaaatatgtaaacggaatcattggaataaacattttatacgctagaggagtaaaaaaaaacattacaaaatcacatatgataaatatttctagcaaaccattaatccttaacttatgcaaacataccttagcttacagtatccttattctcacaatctcctactaccacttaacaatagcttgcacgcttctagctttttcaaagataaataagcttaattatccaaagctgaagttcttccttatgaaaattgaagttcaataacttataacatgggagtaaatgataattaacaattgttgccatgtattctcagcatgaacttcgtaataaagtcagcctagcactctcgagtctacttaggtacacgtttgaattgacgcctttttttgaactgtacgaagctgatttcgcatatgctttgtatgctggctttgaactggccacaaatcgaaaggtggttggaaagttctcatttcaaaatgttcatcttgaaaacgagtataacatacttacggaaattgcaaaagatgaaagggcatcgaaatttagccctactcctattgagtttacctctttcccccatattgatttatctgcttgtattgcttatgactttggccacggagctgaattatcgacaagttatgcctattttagagagaacccagcagaatttgttcgcttttgtattgcaatttgtaaatgcattgaatacttgcactcaaaaggaatggtacatggagaaatacgtctggatagtttcatccccataagctcttacgacaatgtttacatgctcactgtgggatcaggcgctagctattttcataattgtttacaagcgcataattggcgtaaatattccgaagactcagaatcgatgtccagaattttgtttatcagtcccgagcaaacgggcagaacttcatacagtgtcggatatcgtacagatatatatagtttaggggttttatttttccattacctttcagattgttctccttatacgggatcttttgtacaacgaattcgatctattttgacagaacctttacccgacatcagtaaatcatgtcccaaacttccgcatttgatttttaaaattattgaaaaaatgacacgaaaaaacccagatgaaagatacacttcctgttctggtatcgttaacgacttggaagcttgcttggatgatattgacaaagggttaatactcaatgatcatgttttggaaaaaacaggacgtacatctttattctatttgccttgttctatatatggtcgtgaacatgaaatcaaattaatcagaaaaatcttaagaaattccccgcgcgcaataaatcaccaagacaaaaaggatttggagacatttaatccatattatttaaatgcgatagaatctgagagctcttctcaatccctctctttatcccaaagggcttctgaagttatgccactggtaatacttatcacaggatgtgagggtattggagaatcaagcttgattcaaactatttgtgatcgacgtgaagggtatatggctatcacaaaatttgaagtatcacaatcaattgtatactctgcgattgtttcagctgttgccgagtttattcggcaaatccttgctgaagatcagcttttacttaataatttttttgaagagcttaagaataaattagaatcggatttgtatttgctcgattcggttttcgatttggtaccagaaattagaagtttattacaacagttttcgacttcttctggtaatactagaaaaacgtctttgttgggctcgaatcattctagctattccgataaacttgggtctcctacaattctctcaacttcgttttcacttgcaaggccatatcctgagccggctcttgtaagtccttcgactgaaaggccccctaggtcaagtttttctgccgccttgatgaccctgctaaatatcattgctagttttaaaaaagtaacgatggttatagagaatattcatcttgctgatgagtcttctttaattattctccagaaaatcgtttactctgatcttccacttaccttgatgattacttgcgataaagaaaacgatcatgtaattaacaggtttcgtttagcgaatgacaggatacacgaaatcgagttaaaaccactgtcttttaatgctgtgaattcctatgttcaggctactttgcatcgaaccgatgatggattagcaagattttcttcttacgtttatcacattagcaaaggtgtgcctttacttgtgagaaatgtactactgagtatttatgaaaacaagataatttactttgattggaaaaaaaatcgatgggaagtaaattacgacgaaatgtacactcttgacaatgattattctgagcccgatgcatttatgacggccaagaaaaaaatcagtaaactgaacgactcttctcgtgctatccttggttgggctagtcttttgggcccatctttttcttttgcaactgtaaagaagctttgtaaggataccgataatattgaattaaatgtggaggctcttcagtccgcattaagagaaggtataatttacgccacttcttctgatgacacgtatacgttttcaaggtctatttatgttaaagcgatgcgtgatttgcttaatgaagcaaaaatacagattatgcatgcatgtcttattgacgtttgtcttaaaaatcgagatcgttataacatcttcgatatcgcttttcatatcaatgccgcttttgattttgttaagggtgataaacgatctgttgaatattgccattatttgcacttggctgccgaagaggctttaaagattggagctaatcaagaggcgcttgacttatataacagatgtataaaaatgataccacacgaaattcctgaggaaagtgatgatagttatattcgctgccagcttattggtatgtatgttggatgcgctgaagcttattgggtaaatgataatttcgatacagcttcagaaatgttaaaactagcagaggagaaagcttgtaataactcggaggtttttcctgcaaggtttttgtactctcggattttattcgaaggggtgcatatagaagagtgcactcaatatgtattatcttgtttgaagccacttgggtatgagttaaagcgacattctctcgaagattcaaagtcaattatttcagcactgatcccacgtattattgacaaaattactaaaagctcagaggaatctcagtcatcaacagatgacgatgaccggagaattttcgaaatactttcttttttatacgtcggttcagtcgctacttcttacttttcagagaccgcagaaatggccattgattttggaatagcacaagtcgaattttttttaagtactgttgtcaattcgttctccgcttttgccttagtttattttgctattcttgcaaattctttacttgagccttcagaagatattctcttcatcggtaattatggagagaaactgaatcgtgaagctgagaatcctataatattttcacgtactgaatatttgtatgttcaatctcttggttttatagacagtaccacgaaagagagaagacttactattgattatttggacagaaattgtgtcacttgcagtgataaacacgttattattagtctgcttttagtgtcatcatgggagaaatttctaacttccaacaactattcaaattacttggcagattttgaaactactcatgcgcaaattatggaaatgaagccttgggttggtgatacctcattaataacacaattaaagcgatttttgatgtgcttacaggataacatcaaattggatttaatcaagtcaaagagttttttgtcggatcataatatccaattatcatccccagcagcacaagaatctgcgaaacttgcattcagccttcacggatggattaactcatggtatcttctggctcttgtgatgcatggtgaatgggatatggctatcagttatggagagaattttaaacgtgaatttaaaaatgcgcttttaacttcttctagggtatttggaatttttatgtttacttggtctttggtcaacaagatgctcatttgtcccgaattcactaagcaaaaaaaatattatgagcagtataaagaaaatcttggattttttgatagcctatgcattggtgataacgaatgtatcactcgtgtatattttcttttattaaaagcatgtggtttaataatgaatgggctgaattttgaagcatcagttatgctggaggaagtcatctctttaacagaaaaacttgaactttttttgttacaggcatttgcatttgaaactgttggaagcatttttgtgtctatggaactatatacttctgctactcaatacttggaagaggctattcgaaattatgctgctctgggtgttaaacaaaaagctaggcatttgagggataagttcggtgatttgttggtttcgaacaacttacaggtttcgattgatgaagctacacaaacagatttccctttggtgtttagtcctgagcgctcaagtattgacataaatgctagtagtatgcgttctgaaaaagcgtcctttgagattccttttcctgaagagcagattgatgatgatgtttctccagtagcccaagattcttctctggaagagttacttatatctttggacatcatcgatctaacctcagtaatgagatcctgccaaacgattgccagtgaaattgagttgactggtttgctctcgactatgacacagagaatgttggaagattcttcagctaacgctgctgttatagcaattcgtgatgacgttggctttaaaattgcagcttatcgtacgggagagcttaacgaagtttttgctcccccgatgcctattacagaagatcaaacgtacgttccttctagagtgataaattatgttgtccatacgcaaaaagctttgttttcgaataatataaaccatgaatttgatttgcagcaggagcgttggaatatcgaaaatcatatggggagaagcgtaattgctattcctttataccaaaagaaggaggtttttgcgatactctacttgcaaggccctccatcagcatttcattctcgacatatgtcggtactatcaatccttggggctcaggcaagtttcgcaattgtgaatatatctttgtttcataaggtgaaagaggcaactaatgttaatacgattatcattaaagcccagagagaagcattaaatttggtgcaaaaatcggaggctaaatatcgcagctttgtcgatacaatgccttgcttgttatcaaaattagaatttgatgaagagttaaggattgagctttttggaagtttttggaaagaatattgtggtgaattaaatataaacgacccaaatacatggaaggaatatgttcatcttgacgatcaccttaaattacaggatttcctgctctctcacttgcacaatcctcttccttttgaactagaaataagaattaaaaggaaggatggagtttatcgatggaatcttacacgctgtacccctacgacgaacgaaaaaaatagaactagttttttgtgtgcaacaattgatattgacgatcaaaagaaggcacgagctaccgcattagaactggcacgtttgcgttcgaatttcttggcgaacatttcacacgaattaagaacacctttttctggcttctacggcatgctttctctcttagatgatacaaatttagattctgagcaaagggatattgttagtgctgctcgtataagctgtgaaatgcttcttcgggtaatcaacgatttgttgaattttagcaaacttgaagcgggcaaagtcactttagaatctgaccttgaattttctttagaatctgtcgtttgtgattgtatgcaatctgtatattcagcttgtgccgagaaaggtatcaatttatcttataatgtttctccagatattccttttttcacagcgggagacggcatgaaaattggacaaatgttaaagagtatccttgataattcggtaaaaacagttaacaatggatttatccgtgttagggcctttttggctggttcatcgaaaaagaatgatagggaccagttacaaattgcgtttattgtagaggatactcgcgaagaaagcaatgctatttttttggctaatatgatcaattccttgaatcgtggctgtaacgactatttacccatggatttaagtggtaccgcacttggaatgtccacgtgtttacaactttgcaaaataatgggtggatcagtaagtgtagaggtatcacaaaataaccctacatttaaaatttgttatgatctgaaaattcatgaacttggaaaggaaagatacgacattatagctactcctctatttcaaaacctaacagagttcaatgatctcataaaatcaaaagttgctatccgagtttctaaaacttctactgagtatgacaacattactacatatcttcaagctgcgagaaaggttttgcatgtttttaagggattacaagacctagcatcaatttttgacttaagccctgactctgcacttctccgctgttccgttgtggtagtggatgtttattcgatggatgatgttaaggcagtcgaaaaaatattgaaaagctatccggatgtacatgtcatatatttgtgctgtgatccctctagattgaacatcgagcaggaactacagaaaccttcaggaagatcgtttgcatgtaaaaaaagatggggatttcttcaaatgccttgtactagagaaaacttcctcaaggttacattacaagtgtttaagtctaatgaagatacttgtaacttttactcttatgttaatgagtacggtgaatccccaaaaccagatgacgatatggaccggttaaacaaatgtgttggatcaaagattttaattgctgaagacaaccccatagtgcgtatgactttaaaaaagcaactagagcatttaggaatggatgttgatgccgcagaagatggaaaggaaactcttcaaatttttgagagtcaccccgacaactattaccaagtttgttttgttgattatcatatgcctgtatatgatggcttagaggtaaccagaaggatgagaaagatagagcgtaagcatggttgtgcacctcttcccatctttgctttgaccgccgatatgcagcctaccatggaaactcagtttcaagaagttggaataacgcattatctcagtaaacctttcaagaaagaaacactaattaaaatgcttctgcaatatttagttaacggaactgatggaaatgctaatacttcataatggtttttgacttttcgaaaataatttgctttagaggtatttgaaaggaagcctccatcgataataatgaagcaacttcgataattgatgttaatttaatgttttgttttcttggaaaatctcgtgaatgtctatgctaaaccatagaagagctcgttacattttggcattttaattgttatttactagacgacaaattttttatcactggttggtaattctaataaaaaccgggtttaatatctataccaaatttttcttttcttgtctaatacaacatagcccatttcaactctgaactcttttaagctacgtattgtgggtcttttaattttcatgatttttttttttttcacgagcaaatttattcatagtaatctaagaacctaataagtaaactttgcaaaaacgtacaattcgatctctaatagtagtgaacggaggcaacaaatagaaaagaccacgaaaagaactcctgcaagcatctgactaacacaggataattaaaactcgagatatgtagaactaaataaacaaaaaacaagacagtaaaataaggcttattccagataagcatcgtttgttcaatcgtaatttgataaaattaaagaaataaaaataagaacaaatcacaacatctttcaaacgataaacatcactgtatcaacacaactaaaaaaacgttaattaaatgcttaacacttatcgaatgtagtttcgatataacggttagaatattttacaacccatttagacgtgaaattaactaaataggaaataaagctttaacacaatgccactaaattgacatagatcttgatgaataatttcatcacattccaagtgtcagaggagaccttagtcattaaaacggttatgaattttagatagtcactttgacactaaattctttcaagatgataaacagaaagtagtacaaaaatgtttattcaaaccacaatcatacaccaaaacgagcaggaagcgtttaaaaaatatttaatatcaacgcaattcagtaaacaacaaatcagtcaaataaatagctagaaaaggaagtaaaaatctcagataatccattagtgaatgatcgactacgcagaggatttgcttttcaaaaatactgtttcaaacgttgaaactgcatttcttttggacttcgcacttggctcgctagtggatttcgtgcttgcctctacgtctgcatactcataaagagtagtgtggacccaagtataagatgtcgagtgctcaacatatgaaactgtgtgggtttgcacaacaacatttgtttcaacatcagttacagtgtaggtttttgttggatttttcactaacgaaatcttagacgttgtaaatttatatgattcaagggacacaaccgtcttaacaggatttgattgcacgagagaagtagaagatgacgatcgcttactggccgaagatgtactagcactttctgagttgctttccgacctagtagaagatggaatagtggaagaagaggaggttaatccactcgtggttgacgagctcaaagatgactcaggtttaacggtcaaggaatttgtattaatagaagaaattgattcgcttaaggttgatgaactcgaaaacgtcttgggttctgtagacaaggtatttgaagaagcagaagaagcaatatagcttgatgctgtagatactgaactggttaaagaaggtttcaaagtggatgaagtgactgtaatgttcgacgaatatgatgtagttccttcgttacgagaactggaacttgggatagaatagctagtagaccccgaattcgaagttgaaaatttgaaagtcggtttagcgatcgtactgcttaatacgtcggatgctccactttctgagttagaagccaaagcgaaagaacttgaaaatcctgcttttgttccgttataaattgaggtaaacccactagcatcaaagaaagaactggctattgaggagatggaggggatagatgtataagagctagaggctatagacgatataatgctcgtactagaagtcacagagttagaagaaattggtgagctataagacgagttcattgacgattgcgaagagacggaagtagaaatactactttgtgtaatagttggagtagcgcttgaactggaagaagtaaaagcggtttgtggctctgatgcagaattttgagatgaattagaagagattgtataacccgaagtctcaccatcactagactgtgaaattgaagtaaatatggtattaaatccgctggcatcaccggaagactgaggtcttgaaacagagctttgcattgaggtaggagaacttaaaatgcttgaaacttcactagtgatagtagtagttgggtcactgtaagtggtaccagaaaatgattgagaatctgatgatgaacttccggttgaattataagtagaagacgaatcaactgaagagctcgtgtatgatactgtagaagaaacataagcaggactactagtttctttcaaagactgagagcctgtgattgagctactcgatgtaggtgtcgtctgagaggaggatggaccaacactattaacattgaagctactagttccattcaaagaaccagtattactattagatgcaggagtagaaacaatttcggaagttgaggatgtagttccagacgcagtaattgagctcacagtttggctgtaataatcactactattacttgctacctcgtaagaagaggaagcgctgggaatatagctagtagaggctgaggaagttgaacttgataagctattactgcttaaagcttcggtgctgctagcgtaaactgaagaagaagcgttgggaatatagctagtagagactgaggaagttgaacttgataagctattactgcttaaagctccagtgctgctagcgtaaactgaagaggaagattgtatattcgaagtcgaagatgaatcataaattgcactagatgtctgaacggatgtatccgttgcttcagtggcggtactaaagattgaactagaagtcacgggagtcgagtcatcaccaagatacctagtaaacacttctgtaacccatacagttgtcgtcgttttataatggagtgagccagtagtagaggaagaaacagttggaacagccaaagaagccgagctactactagcgctaccatcaattgatgagcgacgaagcaacgacgttacaaatgtagaagacgaagtgggcgaagccaatagggttgagactcccgagttaaggccactcttggaagtagcaatgtaggcatttgaaataatgctcgccaaggaggactgtaccaccgagtacgaagaaactgcagaagagtccatagacgacgttgagattgatgatacaacgttgcttgaagaagtgataggagatgtagctatagaagactccgcacttgatgttgctgtagcagatgccgaggaagaactagaagccatctcttcactataatcaacaacaacaattttagcagtggtgccttgctgaaaccctaccacacaaaagcaagcgcctccagcaccaatgggacttccctctggacaaccttgaacaccattttcgcgaggatcgacatagcaaggtaagccagagcaggtatcaccttcacactcgagtgccaaaccatatgtaggtttcacagttgaccagtaagaatcatcgaggtagattgggttcgcacccaacttaacataggtaatgttattttcatccatgtttgcaccagcaacgtaaggagcccagtttccataaggattcgcagaagtaccccaaacacaaccatcagtggtagatacgccaggtggatttacataataatgagcagcagtttcatcccaataagagatgtcgggcacagctaaaacttgttcagaatcaggggcaacccacgtaggaatgagcatagcttcattacccgggagaaccgtttgacaaaaagcgattccatcacccgtctgatcgacaacggataaatcaccgacacccggataacaataatcctttgaaggaaatggcttgactgccacaccatctgagttgcaatataaacctccatacatggattcaggataagtataagaagtggcattggggtcccattgtcccattaagtagccaggttcacaagcgtaaggacaccatgtaccagcagtgcaatattgatctggagacattgcccaaccggcattaccttcgtcgggtgttactgctaccatcttatctccataggggaaggcacactgtacagtatcgcgtcgttgtaattgctggatttgcgtatcattataagacaaagtcagtggttcataactggaatcagtcagatcattgtgcttttcatgtttatgccgatggtgcaaagtatcaccggcccgacgatgtgagtatgcattcacatttgatgctgcagtaaaacccaacaacaaaagacaaattttttcaattttggaaggcatacccaaaaataaaaaattgtatttattgaaagagagaaatatttatgtaaaaaacccgacaggggaccgcaaaaaaaggattgtgaagtatataattttatctcacagagagattgaaaatgaagaaagaatcgatgctatttcctatgtttaatcaatcttgaaagggtattagtaattaagctcactcttcagtgcatccaaaatcgaccaacacaaaaggtttatcgaaacagaggcctgaggaggcaggtcccttcaatataaggaatttcatcttccgtagaaaatttcgctagcttacgcgacagttaatcatcggattacaaaaaatgtcgaggtggttggtaaacagtaaaagaggaaaggttcagggtgcaaaaatagcagcttgaaagccggattttaccataaatcgaaatatttttataaaaacaataaatatatttatttgaatttctttattttagattattaaagccctttggctttgaaatttatgatcccgccattaaaataggtctgatggctggtgttgaaacgaacaatggagaggttggtaagaaaggaatcagccgaaagtttatccaaggactgaaaattctatattcggctgggatgatctgtcatagctgataatgactttatgaaatgctaaagctatgggttcgcctcaatgtttacagaagatgaacgatgtaaccagaagtccaacacctttttgctgtcctcaattaaataagaagaacttttaaaaattaacaatggtaaaaatctaaagaaaaatgatccacattctatgccggtgacgcatcccattcaagttgaagttatactcatcaatctttcaatgtgctacaatcagcagacaacgaaattccaggacaaagcaactgtaagttctttatcccaattttctaacaaaaagactcaggcataccttacattcctttttttacaatgggaagctagcgcggatattaccatctacagccactcccaatgcgagaagtttcttaagcaagttttttttaaacagcaaaataagtgagtgatacctgattgattaatacgatttatcttgttataataccatcaggttcttcccattctttacaagaagccaaggtttgagatatgggaataccccggaaagtatcgcacattttttaaaattactgttattcaaataaaaatgattgaatcatatttttacagtttttgaatcattgaatggccttgatcactcgtgtttctaccatttatttacattttctacttagcagcagaaattaacgaccagggtaacatgttacttaggcatggttgagcaacataccgttcgtatagatatttggcaaataccacatgtgccacgattgagttaaattttgaaaactttttcagattgctggtattatacgaaaagatcgatatctgttcctatagctcgttttctcttggtttctttgactttggacggattggctatccttttctttagccggtcattcgtttgtttccaaagaaccattaaattacttcttatatgttaaaattttctattatatttttatagactggttatttattgctgaagagcgtgaatctttgctgaaaatctaccggaaactcataatcaatcgatttcaagcagctttgtacgagtaaattggaaacgatgggtttgaagctgtgggtgaaacagcgcagaagtcttccgtttatcattggaacaatagccattgctttgtttacggaccttttcctctatggaatcattactcctattctcccattttcccttgtggaccgagtgggtatttctcctgatcgggtgcagagcgtaatttctacactacttgctgtttatgctgttgcaaacattgccgccagttcaccgattgggtttttggcggataagtttttaactagaaaagttcctatgcttattggtcttatatttctcacttctgcaactgccctgctgacgtttggtaacagcgttcccatgctgatcgtggctcgtgtacttcaaggtttatcggctgctgtagtatggactgtcggtttagctttactcgtagatgttgtaggtgcagacaacgttggttcgacgatgggcggaatttttgggtttatctctttaggcgaaattatagcaccagtttttggtggtatagtatatgaatctttgggctactatgcctcctttggtgtttgttttattattttattattagatattgcattgcgttttctaatgattgagcctcgtgaaatgaagaatgattctactctgcaagatgtagagcgaacctctattttacaacgtcaggatacacaagatcatgaattaaaacccaagcgaagtggtttgttcagttctttatgcctacctatctactccttgttacatcataaacaaatctttggtccattctggactagtttcgtcaattcgtgccttttctctgcctttgatgctactattcctttagagctgaaaacgctttttgactttaattcgctccaatgtggtcttatgtttggagtgttgagtacaccatattttttttgtggtgcttgggctggtgcaatggttgatcgccgtggttctcgtactataggtaagcgtgcgtatgctattttgggatgtacgttgttcctcttgtgtattcctcgaacaaatactagtcttaacatttatttgttctctgctttcctggctattaatggagtggttttggcattcacatcatcccccggttttgttcaatcttctcattacgttgctgaatatgagctcgaacatcccactttttttgggcataacggaccctatactcagctctttagtgcctataatattgtctattctttaggtatgattattggtccccttgttgcaggcttcttgcgcgatcaattcaatttcataacatccattgcatgcttgtctcttttgtgtttttccgctagccttatggctaactcatgttttactgatcggcttgactctgaataaatttaaagggtctcaaaatgcctgatattcctggtcaacggttttcagtcatgttttttcttttgaattatggttgtttttttcatcttattatattcaatttgtaatcaaattgtttgtcatcattctcgttgtttcggctggccgaaaccgatttttgaaaatttccccatcaaaatattatccgttcatttgatggcttttaaaaactgttttacataagttgttgattcacaatgttggataatgtcgtcgtttaccggcaacaaccttgacaagtcttttgccatagaattgtcgcattctgttctttcttttaagtcatttacgttaattttggaccaccaaatagaagttaccaagttgagtttagtttaaaaatagttgactatattcataagacctacatgaaactgatagttaaatttaagacaattatttattattgaagcaaactttcgttctttgtaataaagataggaagagtctaaaagaagtcaagagagttcaaagcaatgaacatgtttacattaattctaccatccttaattaaaatgcgcattcaacaagtcatttttatttgtcgtccttcgaagataattattctccctgagtaaaaactattgtatattcaaaatatagaggtgttttacctttttgttttggtttccaatacaggttttgtcacctcgccaattttgtgcttatattccaagaagttgccacgatgctaacttgtcgagtgccttatacactttctggatggaaacatctaaaaatccttccgatttgcctaaaaaacctgcaaatgtaaaaaaaaatagacgaaggtttcaaaaatcacaaaagaaatcgatatcaccttcttcaggttcagaattaccaaattttaaaacaaccatatcccaaaacaatgaagaggtaaagacttcattaaaggaagattccagcaagttccatccttctgcgagtgcaccaatctttgtccccacttcctccgttcaattaaacgtatctaagaataatggacacaaagcgtctgatatcgtagatgctgtttcatctaaggatgaagaattgcgaaagcatgcaaagggagaagggaaaagatctaaaaatcgaaaaagatcttctaagcattctgaaaaacaggcagttgacttgaagtcttctaactctagtcaagaaacctctagtagcaaaggttctgttaacaataaaagcgagaggtcacgggaagcgaagagtcggatgccaaaaaattcgaaagaaataaaaaaaggattggacctttctaaattagatatgacctctaggatgatagtggaattgaagaacagactttatgagtgtagcgtctgtaccgataccattaacccttctacatcgatctggtcctgtggtacttgctaccatgttttccatctatcttgtattcgtaaatggtgtaaaaactcaatcgaacaaagaaatgaagacgcttggcgttgtccttattgtcaaagtaatcaaacggaaacttctcttcattatctctgttggtgcggaaaacaggagaagcctgagtttgtcaaaaacttggtaccacattcctgcggtgatccctgtggtaaaactagaggtcaagattgcgaacacccttgtcccttgctttgtcatcctggaccttgccctccttgtaccgctactgtggaaaagttttgcctttgtggcaaggaaagtatacatgctcgatgttcgaatatttcaaaagtaaatacggaaccttttcgttgcgaaaatgtatgtgatgagctattgccttgtggtgaacatacatgcaagaagcggtgtcattcaggcttatgcggtgcatgttttgaacctataaacgctaagtgctattgtggtttacattcaaaaacttatccttgttcatctttaccatctccttccataagcaaaaaagatgagaatggttctgtgaaggagtggtttggttactactcgtgcaataacccctgtactttattttttgattgtggtcttcataaatgtagtaaaacatgtcacccaatctctgaaacaagggctcattgtcctttcgctaccgatgtattgacaaaatgcccttgtggaaaggaagatatatcttttctgcttaagggacatgagaggaaaagctgttctgatcctatccccacttgtgagaacatttgtggaaagcttctgtcttgtggccatagatgcaaatataaatgtcatcttggttcatgtggtacttgttcggaaacactgaccattccatgtagatgcactgctaacgaagtgcaagttacatgtgagcagttacaaaatggatttattcctacctgtgaacgactgtgtacgattcttcttagttgtggacgtcaccaatgtaataaaaaatgttgttctggttattcaaaggcacaaacacggttagcacgccgccctaaaggtgctaaattgagatatcatcttcttactgaggaatttgaagaagagcatatttgttttcggccttgcaacaaaaagctttcgtgtggtaatcacttttgtcagcatatgtgtcatcgcggtccctgtcctcgatgtttggaggcttcctttgaggagcttccgtgtacttgtggacgtacaagattatatccgccagtggcctgtggtacgccgattcccgattgtccttacctttgtgttcttccaaaatcttgccatcaccctcaggtcaagcataattgccatcctacctcggaaccttgtcctccttgtccttattttgttaaaaagcgttgtctttgtggcaaacatattttagaaaatcaaccttgttatagagaaaacgttagatgtggggagctctgtaataaacttctatcctgtaaaactcacttttgcgaaaagctttgtcatcctgatggtgaatgtgagtcaagttgcaaaaaagagtgcggaaaaaggagaatgtattgtgagcatgtatgccaatctccctgccatgctggtcatccatgtgatgagcggattccatgcaaggcacctcttgaagtctcgtgtgaatgcggccgtattagaaaaaaagtcacttgtgatgcatcatatgataacccagatcctcagcataaagtgtcttgtacgcttgagtgttcccagcaacaacgaaataaactttttgcagaggcgttgaacattaaaactgatcggcggtccaacgatgtagctcaatatacaaagagtctacttgtattttatggaaaacattctgattttgctgatgaagttgagtcgttacttcgcaactttgttaacaataaagcgtcttccttccgttttccatccatgcgtcgtgaacaaagagcatttgtacatatgttcgcaaagttgttgggtttagaaagtgtttcgtttgaccctgaacctaaacgaaatgtcatggtctacaataaaggagaggctaagttgcccaatatgttgcttaaggaagccaatttgtaccacctgcaacatcctgaaattccattaaagccggacagtctattaggacctgaggaggaaaacgccactgcaagccatatagacggttcatcaaatgctagtgattcgggatataatgcttttgtcttgaaagaattattgaaagaagtaaatgatgaatctgccattttttcggttttagacgacattgtggattttaaccacttgacctggtctattctttttggcgaaaattatattatactaaaaccattaaacacagatctcattgtcaataaaactggcaaactagtggccttgcgtcctcttgtaaatcgacgtcttgcagacgcaggaattgcaagtcgctgtgagatctgtgaaataaacgacaaaaacgaaattgttaaaacacgctctcagagaattcactcaaaaaagaaagcctttttaagtcttgttcctgataaatctattggggttattaatcgatataaggaacttgctactgaattgtagattttattcgtttccaaaacaaaaaagctttttatgacagcatttgttgaggtctttaaattattatgtttcttaatgaaaggatttggtttgggaggataggatttgttgtatctctaaattaactttatgggatgtagcatacaaaataaatgaatatgatacttttaatataaagtatgaactaaagtgaagcgatgtttatagctttttttttatttgaaaatacaaataatctatgtcaaatgttgaaacaaaaatactatttctcaaggaaaggataatcttgttgatacgcgatttagtagaacctttaaagctgcatcgaaatttagtagttctgcattctttttgtttatcatcacaaaaaagaagggaattctgaattgagccaacagtttttagtttctcaatggcattcaaaaaaaaccttgaaagtacatgaatagcgttttgttcagtcttgtggctagatagttacaaagagtaaattaatatagttactaactctaatatgttctacatgtaatttatttttgtttatgtttaaacatagaaaaggacgaatagtggaatggaatcttatttaatttatatttcatttgcctactacgcaaaatctcttaataaaaatttatggtatcgcagcagactgctaagttggctaaagttttttaagattactcattatatcaattaacatatgctaaaccgcgctataatcatttgtgctataataagataaatcatttggaaatgaatgttgacagttttttatttaactttcagtaattttatgcactgcagaaccattcaattgaagctttattactcagtagtaaataagctataatttattataatactatgcaatatcatggttatatacgagagcagtgttatataacgccaagagttatctgtacaactgtatatacgccaagacaaacttacggtagtctaccatattctttaagtttgttttacgcacttcataccattaccaaaagttaacatcgttgtaaatcgttatgtaattttaatcgtaactgtagtcgtcactattttatgaagtatgcggaatacctgtgatcataatatcatgttcgctagaaccaaatagatttcatgaatgaagccttcggaagctcgtgaacatgccataaggaagattaaggagtatctagaaaggcgacataaacaacagtttaaggctttgtttggatgtctcacgatcaatatatacttaaagatattcacgctcatttctaccccagatctgtgtaattgccgccttgtttgtagaaaatttcaacaattatgtgattacaatagtatatatgtgaaaaaactacttcttatgaatgcttgggatgttacactttctcgaaagctttattatgaaagtcaagatgggatgtctcaagcaaatatgtcttccaacaccagcaaaggctttcatttacaaagtagtgataaaaagtatgctgactctgatcggcctaagctgtcctcctcgtcacttctttccttacccgaccaaaagatcccttttcctgttgattactcaacagtgcaagggaagcaagtagttttgacagttttggattgtgtgagtcaaagagttgaatttgcaagattggattacataaaggtttggagagcattggctcctatctaccgaaatctggcttatgctagcaatactattgaccctattgcattttctgcttttcggacgccagaggagcaatcgaaagttctgaagtatttaattaggtttggaaattcttatccctatggaacttatcgacaggcgatgcaaaatgccattcttgacatggcttcattatttgagcaagcttgtcttgatgaatttgaattaggtcttcattctcgtaatcttgatcttcttcgtaagttttctcatgttcttcatgattttagtggtccaaatgcatacgtgagcatgtatctagcaaagcaaactgattttgttaggtctttcttccattttgatccgtatagtttgtttatttccaataatctagaagaaattcacattaattggaacatcttggagtctgttgttaacgacactatcaagcttttagagtcggaatccaaattctctgaagctactttacctgagcctgagcttgtccaggttccttatgctaaagacattcttggaaattcactaaaagactatgtaatatcaatatgcgagcatattggtgaagaagagaccgaattgttccttgtttttatttctggattttatggcctatgcaagaagtttttttcgattcctaatggaccggctttagtggatacaatttttcaaccgcaaattgatattttcatttctcaggagttacattactttaaaactgttggctggtcgctggttgatcagtgggaccaaaagctggaagaaaaagaagacgctacagaatgctttttttacaaaaatgtcagccagaatactgccaaaaataattttttggaaacctttaaaaacgtaatgctgcttccagtctctctttttacaataccgtcagaaaacaatagtgcatctaatttggctgagaaagcgatagagcagaaagaagaagaagatccagaactttcaaagttggatgctgcccgatttgttcctgcgaatatatatgtttctaaggaccgattgaaacatctccctactaccgaattagccgcgcaagctgctgtattggactcaaaacttgaaggtatcagcaccatgtttagtttggaattagctttgaaaatcgtccatctttgcaaagttagtttagctcgtgctaaagtatttatgggtacctcggttcctcaagatgatgatattaaagggctttcgaaggacttattcgttcagcttctgcgggagttaggtcaaggccacttaaagcatgggtttgatcgagcaatcgagcatctctcttcttttgatcctcgacgcgacttttctagtaatactgtagagccagtggtgaaatttttggagcttatcaatgttggtgatatgattcagcagatgatggatagcttttttaacgaagaaatgagtcctatatgtgtgaaagatgatatgtttgaccctgcaattgcagaaaaaaaaaaattcgagcagcttttggatgaacgggcagctttcggattacacaaaggcattaatgttctaattgagcatgccgattttttgctggaaactaaaacaccaatgaatttatttagtgaccaaactataggttccataacgaatactatagagcctacagctgctgccaaaaatgtggttcaatttttaggtttccacatgcgtattctagttggaagggccgatcatgaaatccttgatgttttttataaggaagtcggaatgagacttttcgattccttaacacgttacataaaatctcataaattcagtgtcgatggcgggctaaagttactcaggtgagattttattccttatgtttaagaattataaaactgactcattttagcgattgtaatttgtattatgaattcattcactctcttcatcaaagcagccttttaccatattttaagacattgaaggaaattgcccatttatttattattgatggaaaaaacgccgaagagattggaaaactggctaccgatacttctcgattttctagcgcatttcataccgaagaggtttacgaaatccttcacagtcgtattgactggttaaacatcaaatacgaagtagataaagtaatccatggactggcatgctgtataatgtaaatattttttattttttgttcatatcctttttttgttattaccatacactttaaaaatgcatcttgctttctgctttaggctataatgtttgtttaacaaattcgttttttggaccttttttaggtttgtgtctattataatatcctctaaaagtcaatcaattttaatgtcataataaatcataaatgcagtagttattaaggataaaagccaaaaccattttattaacctaaaccgtaaaagaaaaccaaattcctgaaattagttctaaattttttaacaacaactatgctaccgaaagcgtaaatatcagtgtgaccatatacggactgctttatcagcgcctccagaagcgacacgctgtccatccggagaccaatccaccgcaaagacttgatcttcatgacctggtaaatcaaacttcatctttttggatcgtacatcccacacctttagcgtcgtatcttgagaagaactgaccaacaatcgtgaatctgtagaccaggcacattgataaaccgcagcaacatgaccacgcaaagttgcaaggaatttaccggtttttccatcccatagcctaactgagctatcgaaactagctgtagcaatacaccgtccatcaggagaaaatgaagcatggtttactaccttttgatgtccatgcatttttgtgatgggcttcgttgatttctgtggatcccataatattaattgcaaatcatcactggcagaaaccaatctctctcctgactgttttaaacaagcctcataacgctctttggccttacgacgctcatcagaaaagctttttggtttaaaatcagtatgatcatatgcacccgaacgcaagacatgctcggtggacaaggagagatggttcacacgagcggcatgaccttttagaatatgcaagcattttcccttcaaaattagtaagtaaataatccctaagtacaatttccttcacttacatctttagcatcccaaatccgtatggttttatcatatgaggaggaataaatccagttttgaccgccccaacggacacaagtaattggcgcggtatgacccgagagagtaaaaagcaacgtccttaatttgacattccaaatacgaactgtattgtcttttgatccagaagctagtaaataggggccactgtcaggagcaagatgcaaaggttgccaacatagtgccataataggtttcgtatggcgtcgtagagcatcacctatagggctcccctttttgggatcccagaaacgaatctaaaaatattagtgacttgcgacaaaaaaatcataaatccatcaaaaagttactcaccgtattatccatgcttcctgtagctatgatagaggcatcaggggcccaagcgacgcaagacacccagttagtgtgacccttcatggttgcaataggggtttgcgtatcacaatcccagagccttgccgtgaaatctccacttccagtaactagcctcgagcttgtgctaggcgaaaattgggcagatataatggtaccatcatggccattcattgatgcagtacaacgagtaacagcacggacacgaaatacagcttgaggagtgtagagtaacgttaagtgatcctcagttttcataagtccattgtgaaatacagaagtgtataaattatcttgaatttcgatagtttcatcttcatgatgaagagcaaaattatacggaacaggatcgtcggactgtgaggattatgttagcacatttacagaaaaaaaactttcattcttacattctctaataattggttcaacaaggcttccaattgcctaacagaactatttccaggaactaaaagtgatgccagttcattgctatcatctgacgcccgaaactgaacgttaacgagcgggaatttttcaggaatttctatagtagtaggatttaagctctcctttttttgacgtttacttttaggaggcagtaaagtcgccattttagaaggatttaaaaaaggaaggatttggtagtggtagtaatgaaaaatacttacacttagtattcttaaaagagctgtgatcagataaattttatcgcgccaatgatgcatcgcgataattttaacaacgatcttcagcgaatagaaaaacaattatagctaattaagctagatttaagcgaggttataaaaaattagtttctgcatgtcgaacaagagaaacaagatcttagagtttttataaaataaattttaggtaattcttttatgcttgatcaaattaactagaagaattattgaaaattttcagtatctcaagaaatggttgggacgacgaggtaggtgatattttgttcattggcttgggaaccttagtgataaaataaaagctaaaaactaaaataatagttttgagattgtaatattttaaatcacaggataaagcacctatcaaaaaaaaaaaagctttactaactaaagttgatgcttgcatgaagatttgttacaacatgcacatagagctgttttggggaagcattggagttgaccgatgataaacatcagacttgaaatctacgccggtttgcaccgttgatgctgggttggatgctaagctattacgaattacaaatacacggatacattatcagtatatgaaggaaatggactatattatctattaatacaaaacccgatgaaaggctttttttgcttccagatgcaagagagttcatttcgctgggaatgaagatgaataattttaaagtaaatcatcgcaacaaaatagaaggaaaatgctcctcacgaaaatgagtggatacaaaaacttttatgctgaattagcgggaaactccaaccaatctcttaaataaaaagaaaaacatataaaaatccaaagtatagattttatggaaaaaatctagaaaagcatatcgagtaaacaagttcaagcaagggtatacgtgagaaaacgagaatatattaagttaaaatacaagcatcccgaaagtactttcaaggacttcaattttttaacggtatgttttcaactagctcgtgatctaaactacacgaggaggaaatctgaatgttgaattggcgaaattaggtgccgaagaagtattcgttaaagtggtgggaatcccagcattagatggagtaggactaggatgggcacctggaagatctctgaattgaatctgtggggtagatgaattgttgtgccataaaacgctaccggttgagcctaaaccgtatagctggttgagcatcctggaatcaatggaaccatcaaaatacctcgaccttatttcgaaaaatattctcgcggttagcaaggcatcacttccagcctgatgttggggtcctatacgatgtatttgtaaatcgtcagcaatgtcttgaagacctttagagttgttcaacacagatttcattatgtattttatgtcgtaatttttcggaaaataaatacaaagaattttataaaactcctcatattcagcgggtaaagggatttgtgtcatggcttttaataaataggcaaagtcatatccactatgaaacgttatccacgtgacctcctcttgcaaaactaatccactaccaatgaggagctctgcaaaatctgcaggctctatgccaacctcttgatgtttcttaaagtcaatgccactttttgtgagtaactctatgctttccggagcgtacatatcgtcttgtagattgaatgtaaaattaaattgccatgtacatgcctcgacaggggcatttccttcctcgtcacttaaagcaagcccaatttgaatgatttttaatgaatctacgtttgcccgtaaagtttgatagtggtagtcatcactacttttaaagacgccaagaggtctagcaactactcctggaaattctgtatccatagaaacaactggatacctttctattagactcattataagattcatctcttgttgcaaattcgtggaccaaacgtcccgaattggtgatatttgggagctgattccatccactcctaatgcaggataagaaaaattcgaattcatcgctgtcattacgttttttaaacagcaaagctataatgtaaaccaacctggaaaagtaggttttcgtttggtgtaagtagacttggattgttgaagaatccgctgaacatagatgcgttaattgtgaatactgtaatataccacaatttccttatatgaattcttctaatcacaagagaaaacattgatgatgaaactaaaagttagtcatagaagggtcaactattaagttaggtattaactaacctacaagtgaaactaaagttattttaatggaacaatactgtcatatgtttgtttggaatatttattaaatcaaagactttctgtcggcttaccaagctactttggataacgatttgaacttggcaaaaaaatatgcaatctgacttttgttctttattataaacttctcgtatctaaaaaatatttttttaagtaaatttatgccattagtaagtcgacagaataattttaaagctgcaacgattaattcgttcaagctcatttattaagggagagtagcagcaagaaagctaaagtatgagtcactttgtagagtgttgaaatgttatctttagtaagtactaagtccagacctcagtgagagatttcaaaaatactattttctgtaattgtatcttaatgtcagcaatcgaattgatgagcctaaacttaagcaatctcatctaaattattaagatttgatctcttatttggcaacattataactgaaagattttacttttcccttcaaacaactcaaaagaattgttgagtcatggctgtctttagttagtgttagtatcgcaagaggaagacatgctccttcagcaacgatctatcttcttttcaaaatatgtgtattattaaaaacataataaatttgcagtatttggaattcaaaatttattctttactttataagcccagctttgaattcttcaataagcaacatattcgttttttgtatgttaaataaggttaattttaaacgaggatacatgtaccactaaattttaacaaaatcctattaaaaattaaatttgttttttccctaacttttaaattacttgtttgcaggtatttcagtttaaatagacatcttaaaggagtatttgagttcttttttctgactgtattcaattagaattggatttccttatggcttaatgccgcttgaaagatatggaaatatgacattaacaaatttatacagaagccatttgacgttcaattccttattctattttccagtagtagtattgcattgaattaccagcactagaatttcccttaaaatttgttatatttacttttctccttaatattgatggatgttcaaatgtatgatttttcaccttcgcgctacctatttataaattttttcttcacactttgatattttattgtcagttagtattaatatgagcctaatgcatcttggcccggatttatttcgacgcagggattttgaaggcaataaatataatcattaacactttaggtaaatgaatctaaattctcgtaaattttttttttgtttaaatcaaatttaattttcggccacattttaataacaacatttaatttaatttaacagggaactgttaaaaagccttgattattgaaccaattcaatatttccttcaaaaattaacaaatattatatttctaaaatttaagctactcgaagactttgacaaatactgatttaaaccttactgtaagcagttgtcaatgcagctcttacattaaaaaaattatttaataaaaattgctacacaattagggttcttttccgattcctgcatttttacggatctcttctttcgtatgtttatccaagtttggttcgagtaaccttccaaagtttatagagttttaagaaaaagcggtactcattttagaaaattattttagtttaaaaatttttaaggcttggagctggctttttcatacttgttattcctacctgatgaatcattcaaataattgtgcgtcaaatatttagtcgtaaaaatattcatatttaatgaaacagtattcagaaaaagttgatttaaaaactagtaatattaaaaagacatgaaaacaaaccatttttatatttatatttgttgaaaagtgtatgtctcaagagttactattagtgttcagtatcattagatacatatagcactggaaagatcagatcttacccaataccaattacacgccaaataggccaatcgagggttcgtgtattttggttaaatacaaaaattaaaagtttttcaataaatctgtgattcttgtattcaccttggcgtcgtgaagacaagcaattgttgatcagaagacaaggtttcttcatccaagttactataattgttggatcgcctttgaatgattattagtttaaccaagttgaaaaaataaactaattaaataacaaaacaaaaaatttatattattttgccctatatatatttttttctttaatcaggagtctgaaatatgagaaaatttactccgaagttcgtcccacgaagaaaaaatgggcctgttgaagaaaaagatgtggatgagcgtgttaagatagaatttgacgtcgaatctcaaaaaaaatggaaagcttcaaggccgaaaccagaaataaagcttactgcctcaggaccttttgcattaggccctaatgcctcttcttctggtactggccgccccatagggtctgtgtatgtgccacctcctaatgtcaaaaacgaagaaaaagatgatgccctgtccaaacttgctgcttcttctggccatgatgaaggccatgatgaggacatggtcgacattcttaaacttcgagaattaaatggccaagagcaggggaagacagatattggagggaaagatcttttagtccccataattacggatcgtatgcttcctgagtcgaatgatgaaaaactcaagcaccatgctgaaagcgctattcatacgacagttattaacaaggaggacgaagagcaagaaagagttgccttggatttgcaatccttagctcaacaccttggactgactgagcaagaaggaatggaagatcattttaaagatcaaatggttctgatgcaattccctgacaagcttcctaggtttatgggtgatgcggatgtcgatccagtatggccatcgtccgaagtcaaggaggaagaggcaggtgaaaagactgacgtagaagaaaaaaaggatcctgataaacatggacgagaaaatggtaatattgacgacttaacatctttaccctatcccgcatttcacccacctgctggtcagattggagttttgcgtgttcatcaatctggaaaaactacattggagatgggaggcgtaaactttgttgttcaatctggttcagattgtttatttctacaagaaatagccgttgttgattatgattcaaaacgaatttggaaccttggttcctttgaacgtcgaatgatcgttagtcctgatttttaaaaaaaaagttgaaagctttttttggttaatatatgtttttattcgctactaatatagttatttccttactaagcgacgaacagtcagaatttccaagcacaaagtacttcccttgtgtttacctatttatttttactctctgaataaaggcttttaataagtattatacacaaaaaattttttcaagtatcggttttcaacttgttttggtataaactaattcagtgtttaaggttctgtaagcaagtaaaaaaaagttggataaataattattgagatagttatgaagtccattaaatcttattaaatagtctgtctattgaaattagactcgcattcttgatagtaatcgtgaattattgttaccactgtgtttaaaccatttaccctataaccttagaaaaatttattatgcttaaaggtcttttgaagatatttttatgttaatgttctagctgaaaaccgtataatatagtgatacttcattccaatatgtacttttttcgtccagtgcttcccttagcgaagtcagtcttcaacttagcaaattgtccatacttaatttacttcaacgggaataaataattcataattaataccttaaagtaatattatccttttaatttataaacgatttctgggactctggtttgtctgatgtctgacacaattcaagcttggtattaaatgatttcacgaggtcttttatccaaagggatcttatccattattaaaagaaaaaatacaggaaatttaatcccccatgtttattatagtgaataccatgcagacatcgaagagagaagaaaagcgctaggacgactgggaatcagcttgtatccgtcagttacttcagatgcctcaacgactacaattcctgtaataatcgagaaatggaggaacaagattaccaagtctgagatcgcaatggtcaggtatacggtgtgtggtcgaatttcaagcatccgttattcaggttccaaacttgcattttttgatgtcctttatggaaataaaaagcttcaggttgtttttaataaaaagaatattggcacagaagaagaaatgaagggaaagtttattcctcgattaaaagctctccaaaaaggagattgcattcaatgttctggcaacgttggaagaagtggaagtggagagctttccatatatgctacagaactaccaaaattgttatctccatgtctccatccaattcccgttaaactaacgaactacgaaaaaagatttgaaaaacgctttgtcgatatgatgtcaaataccaaatcacttgagttacttgagaagagatatcgaataattgaatccattagaaaattctttagtgaaagaggatttttagaagttgaaacccctattctttcacatcactttggaggtgctactgcgcgaccctttatcactagtgatattcataaactacccttgacactccggtgtgctccagagctatggctcaaacaactagtaatagggggaatgaatcgagttttcgaattaggaaaaaatttccgaaatgaaggtatcgatgctacgcataatcctgagtttactagttgtgaagcctactgcgcatatttaaatttggagggtatgaaaaaacttactgaagagctaattagatttatctgtttaacaattaatggaaacttgcaaataagcggtcaaaccgtagacctagaaaaaggatttgaagtcattgagtttattcctgcattacagaaggagcttaatgtagagctttcccctctagataactctgaaaactgccggaaacagctgatatcaatctttaaacgttgtgaaatcatgctgccaaagacgtgtacagtagctcatttgttggataaacttttcgattctttggtcttaaaatataatacctcttcccctaaatttgtcattaaccatcccgaagtaatgtcacctcttgccaaatcagatatcaaattatacggcgctgtcgagcaacggatttcaaaaagatttgagctttatattggtggctatgaaatatgtaatgcctatgaggaagaaaatgatccagttgctcaatatcataaatttcaagcacaaaaatatgaccgtcttcaactaggagatgatgaaactcccgcgccagactctgattttgtacatgccttggaatacggtttaccacctacagctggatggggaatgggcgttgatagactagtcatgctaatgacaggacagtcaaagatatcggagatccttccatttggatctcttcgatatgtttaggttcaagttgggcttccttaaggaaaattaatatatcctgctatcttttctttcttagtaaatgtggtaaagtgaaattacaaaatatcattaatttaattcgtgaatacataattgagatgttaacgcttgtcaaaatagattttacattgaaactgatttatcgagccaatcgtcgtactcctcttgtaaatgagccttgagttttgtaaagtgccgtccaaatgtttcaccacacctccagcattttaaatcttcctgaaataaagaagtgagggtacctctagttggaaggtttgaagttggcgtatcgatttttacaaagaagggtgaagtaaaggaaatatagtgagccgaattcttcaaggaaggcgaaacatgatcaagtgtcataatatgtaaatgcaagttattcatagatggtccagcgtgaaaaccaaccttgatataattacacaaggcctcgtttgtcaattgctgggagagacagtttcgagcctcatcgaaaataagtccagataggtcgccctgtacataagacacaagtttttcgactagagatctgtgtttcatcataatttccagtggatgcacatgagttaaatgaggatcccgagtcattagtagtaagtgcatttttgattttggaaacatgtcccgcactagaacaacatcatcatcgtaataaattacatttttataggattccggtgattcgatatagacttttaaattatcccgaaatgactgcttcctatacttttttggaatgtcttcaacaatgggttctttcgcagaattcatcaagactttgactatgcaaaaacaagattagtaaaaagatttatttcaaaaaaattaagctgatttcttttcaaacaactagcaatcctgggtattccattctaccaaaaaaaaacatcaaccaattcaagcgactttttagatgcattcggtatactgaatatccaataagttttctaaggtgaaatatgagcaattacttgttactaaatagggaattctgagctttaatgaaaattgacttacaagcatcattcgtcttgtgtacgctcatttcacgagagtcaacaagaaatcctttataaatattttctttgtatcctttttatatcaaaatttgctaccacagattgatttgaagcttcaattgtaaaattttcagagggggtcaaatttggtcttgtgtcaaatcattactacgatatatgatatgtagtacaagagattcgttaggatagagaaatgtagggaaatgttataaacactgttagaaaaaataaaagcaaaaatgaaacgttaagatcttgaagaataggtattcaatactttaacttttggttttacttaaatatctgaaatttaaatttaattgagcttaatgatttaaagaaactaagcgaaagaagaaacataaaatatgttaattagactatttaaatagtttgctagtattttgtatcaaggatattcgactgttggtacttgaacaaagctgatctttaaaatccgacaaaccattttggaggtgcatattaaaatcagaattgcataaaataaagaccaagcaattcaatatgtcatgaaagattgctatattcgtatgcttaactgcacgtttcaataaacttgtataaaaaagtaaagattatcatgaggaataagaagtttagaaaaattaaacgcaactggtggaaattaatttgttgtaaagggaattattagtgagaatatcaggttaatcaaagcaaaattattaatagtgaaaaaagctttactaacagtcctaaaagcccaaaagtcggacaatttacattaaaaaaggttcaaaactttattgaatgtattgaacaatacttcatgagttttgtatgtgcaatatcgttccaaccatagaaagcgtttgcttgtatcgagacttgtattaacaaatcaaaaaataaaataaaaaattgaaaagattattcttgaatatcgtctacataaaattctcgtaaatcaattttttagcagctcgccaatttctttacttacttcttttttcaacttctctcaaaactttagaaatcgaaagcacaagtcacttcggcaatattctctttcatttttacaaaattctaccttttaaataagctctatgacatttcccaatgtcaagttcatcggtaataaacgagttttatcgattcaggtttgtaattgtcaatgaggggtgctttgctcacaattccaacagtcttcagtaagccatggatatgtagggaatcgttctgccacatttccacttcaattgcatgaatgggaagtagatgtcgtacctacggtacatttttcaaatcaccttggtaagtaaaaagatttccatcgagccaagcgttgaaaagttattctaaatctgacaaaaaaaacattgcaaaaactttttgggcaaagaatttgcgatatacgcttttaaaaattctgaatttcacctaaccgaatgaacaggatatggagctactcgaggaagcgcttgcatcccagaggaggttcatgatctattaaacgctttattacaggataatggaatagtttacgatgcaattctcacagggtttgtaccaaatcatgatattatccaagttatatttgattgcgtgcttgcctacaaaaaagaccatcctaaggtactttggctattagatccagtgatgggcgatcagggaaagatgtacgtggatacaaatgttatttctacttacaaagcaatgattccgcacgcattcgctatcactcccaacgccttcgaagtcgagtaagtacggcccaattgttaatcatgaggatttaatagttaatcttcaacttatgtttttttattcttatctactaacagtctctcatagaattttaaccgatattgttattcatacccagatggatgctaaacggggacttgaaaaaatctatcaactctatggaatccaaaatgccattattacatcttttgaagtagaagaaagccctggaaccttgttctgcatgggatattcatgtgaacatggaaagcctcagttatttttgtaccaatttccttcactttctggcgtatttacaggaacaggcgacctgttttcaggtttattactagcaaaatacagagaggaactggacaagagaaaacatcagcaatcggacgaaaccaaacaaacgaaaagaccaactgtacttgcatgtgcagtcggccaagtattatcttgtatgcacactgttctagtcaatacaaaaacgtatgctgatgaaatcctcttggaagaccccaaaattgctagtgatgagtttttgttgagcaatgcacgcgaacttcgtttgatacagtcaagaactgccttgctctccaaaaagagtatttatgaagcagaatttttaccaggatttgaggaaggtgaagatgtctgagtcagcggggtagaagcaggattcgaaaaagacgtttgaacctgctccgccatagtcggtgtagacatatcggcatcagcctttggtgtttcttgttgaggctcaggttggttaactatttctttttgtttttgttggttggcatttgcgtctaacaagaactggcctagaaattgaagagggttctcaggtctgttccatcagttagcaaatgtccatatcatttcccttttcttttactatcttttttgaaactttaactcatattttgcttacctgtctcgtgcgagtattttcataccctctaacaatacgggcgtaactttctcatttaaatattgtctggcaggtgcgctgtttgacataattcaggcgtttacaaatgaaatagtacgtttatatagaagaatagagaaaattacgaattcgcaagaaaaaacaatttatgctcctttggtgttgtaatacaaataagcgctagttaaagctcagaatctgtatcaatcgcaagaacgaaaatgaccgccaaatgcaaattattcgagtttaacgttacataaacgcgcaaatccacgaacagtatgatcttttcaatacaaagaatgcagagatttaaggtcctgttgggttaatagaaaactgttagcaaagtatgtatttaggccagtaaactgcgatattttttttactgaaatacgttagcattcacaactgggcttacagtttctcccctaatatatcaacgattgaaatctttttaagataatctaaccttttatttagtcgaataaaaatttcaattttctctttaagctaaatttggttgaaactgcttttttaggtcgcttggataattgcttccttttctctttcgctttaaacgactttgaatctagatgaaaaatggtttacaactttacatttgtgatgattacatcgtaaatatttacattgtgcctatacccaattttttttcttcgtttctttagccacaagcgttagttgaaagtattgtttacacaggaagggttgaatcagaaacattgtatgtatgatagcgttatattagtagacaacacttgtaggcaaacctatcccgaaaaattttatttttaaatatatacatatgctaatttccaacaataagcagtctactttcttttccgacgatgtttttttctttcaccaacatcacctattatgtttacaggtaaagtaggttcatccgttgtatggttttttgatgatctctttttgatgcttaaagggttaggccctttaggacccttgcgttttttattggcttttggagcagaatcctctgttcccgctaaatccgtactttccttggtatcttgatcatcgatagccagttcattcgctgaacgcttttttccggataataacaacttttcctcttttgacatgcccatctgaacggattctttgttgtgcttttctaataacgtagctcgtgaagctggttctagtatcacaactgaccttttcatatatataagtggaacacctgggaccgaacgaagagcttgcctaagctcggggtcttgggtagcaacaacatagcggtgcttgttccgaccattaatgttgactacactctgaatacattctgaaggagagagtgcttcatcaatatgaccacacctccttcgctcaaaagactttgcgatacgaatttcttgcttcaattcatcggatttactgtacaattgccgaatacaacattgagtaatcactatagtcagttagtaaatccgttagttataataatttacaaggagaacataaggaaagaaaataataaaccagacccggatgaaaagatactatgttgaataattaaactttccgttctgtttcatattccgggggttcgcccttttttccagtaaaagaaaacacttataaacaaaacttactaggttttatagctccttgaacagtcctagctaatgcagcttgtatatcaatcttttgttgagataaatcttttaggaaatctgcatccactaaaaatcatgttagtttaataacatcaccaaaaagaaaatgcttattgtttgcaaattagaacttgggtaaggatgcatctttacaagcatcattttctgtaccacataccgagtacttgatatggttcacgaaatccaaataaaagctgatacgtatgcatcagctttctgtaattctttgcccttttttgcctcatatttacgcccttttctgtgcgtcacacagcctaagacttaatatgctttagatcacttgtttttttaagaattttttttttcgctcaaaaacgaaaagtcttttgttactattagaaatattaaaaaaataaattcaatcgtattaaaagaagtatccaggaaccctaatattgctgaaatcctcttattaggaaatttccaactagtttgtactttccaagttcacccacgtactaaaattttgggcgctttaactatttaacttaagtgagatacttggcttcgaactgagtgtatacttcttttatttctctatttagataaatttgtaaggaaacggtattaagcagaaagaggattcagtctattatttacccttatcatactttttcttcatttctactgcgtaaataattttaaagctttgctttttattatttgaaagatttgtcattattactttctttcttctaaagcttctttttcttctttttataaaattgtaaatatattcggatccaaaaattagaggtttatttctgaagtgtttgttttgttgcttctattttcttaagaatcaatcaataaaaacatgagtgaacagcgagtttttaagcacccttgtcaatttttaacatggaattctaaacacaattacatcgtgtgctgttcaggtccatatctattggggttctcatgctctacaggggaaaaaatttttgaacattgttatagagacaatataaatgaaaaacatagagaggcagctgcctatggagaagcgattcgtcaagtcgcattttctaaagactattctcgtatggcaacagttagtgaagacaaatgtttgcgcctttgggatagcactcagcctgataaaattgaacttctttatcaaaaaaacataccaaagcgatgtgctgacttgtgctttgcgggctcaaacgaaattgtttttggtgataagtttggtgatgtctattgtgtagacgaaaattggtttactacttctgaagttaccgaagaaaaaaagtcaaatgtggttgaaggaaaacaagaacctgttaataatgacactttaaaggattcgaaattgcaaaaactcgaacccattatggggcatgtttcgatcttaactcaattaatagttgctcaaaatccacaaaattctaaagaagaaataatcattacttcagataaagacgagcatattcgtatttcccgatttcccaatgcatttgtcattgaagggttttgcttaggtcatgaagagtaagttttcatttggttttagttgatcaattttttttttttttttttaaataacactaacgccttttcctagttttgtatctaggatgtccttatatgacaatcgtactctaatatctggcggtggagataatcacgttttcgtatgggatttagagaatttcaaatgtttggatgcattcgatctacgatctgccttttccacttatctctcattaaatcaaccaatggtggtttcagttattcttcctatttttaagcgccagcttgttgcttttgcgtgtgaaggaatggcgggtcttatcttcgcgaaggtgacacctgaaaagagactgttgtttcattctgctttgaagctgtcagggcctgttcttgacgctgttttgcttgacacggatactgatcaaattctcatttctttggactctagttttacatttggtgcatgttttgaatgcgtgaaatttgatgaagggaatgcggctgttcttacgaaacccgatgtaataaagcgtatagaatctgatggtttaatatcaaccgaaaagccgttctgcccgctcgctcaaattcacacattacgcaagaaccactctaaattcattcgcagtgttgaaaccggtacatcttcgccatccgttgaatctaaagataattaaagctcattttagggagaccggctcaaaaaaaataattgggaaaagtgggagcatcagtaaatatggaaaatagatatgaataaaaatgattgtgacattaaagtataatagggagagcatttaatttctttggagaaacccagaattttgaagtataaatacagtcagcgattaataattatgcgaataaacgcaacttgtatctactgcataagtgcaactgctattcagttgtgcaacgtcagcaatttgaagaagtaaaattaatcgtttattcaattccttccatttacatgctacgacaatactttacataatacttgcaacggcaaattgtttttagaaggcctaaagaacacgagatacatccattagtgctatctaacaaaaaaagcttagtcgaagagaccgaaacccatgtcctcatcggattcctcttcctcttcagcagcagcctcggcagcgggtgcctcagcttcaccaccagcagcagcagcaggagcagcggcgactacgaaagcagagggatcagcaaggaaagccttagtctaaaataaagttagtgaactgagtacaaaaataatttaatgattcaaagagtttaattgtatacaagcgttcagcaaaaaattagagtgtttaaactttgcgctcatgaaaatttagcgagttaaaataatcctcatcaaaacgcattgcaaaacaattgtttcatatataatgctccttcaacgaaatctgccgatggagaagcatcgaaaagattaaggaggttcaaaaatatatattttttcattgaacctcaaagaaaaggcattatttataacaaaaggtttaaaactccttgaagtatttgatattataggacatacctgttcagtaccctcgaaggtgtactcagtggccaaagagacagcgaccaagttcttgtaagcgttgacaacagagtgcataacggataagatagtagggtagttagcgcccaaggaaatggcagtgataatactggcagcagacaagaggtgaccgataagatcctcctcagagacgtcaagaatctcaggactaaagacgtttccttggtcatagatcgtgagaacatccataccataggtgaagggagagatgtttaacatgttaagcaaagtagcctcggaaggaccaactttagcatccttggagaccaaatggacatcggaagtaatttcaatggtaccacgagtaatcttggtggggataccaagagcttggaagaaagaggtcttaccgggttccataccagtgttaccggcagggacaaagacatccaagggagcaatggcgttaggacgagcaggagcagcaataacattagcaataatggtctcacggacttccttcaaatcagcgttggtgaagacgaaaccaacgttaccacgaacaacaggcaaaagacgctcaagctcaggcatatcgttgatgataccacgcatagcacgacgaatcatggtgttcttacccatgataagttcagcagttccacgcaactgcttacggacagtatgcatttgttgagaagacacattgtcgatgttaacaacaaagagagagttgtatttttcgaagagagagcggagcttctcgaagtattgagccttgctttccttggaaattgccatctttttgctggtttggtggtttgtgaagaaaataaattcttacccaaatgtttctactcacatattgtcgccgtgactgttttttggacttgtcaatcgagttgtggagaggcttatggtaccaaaccgtagtgccttatcaaagaattgcgagagacatagtgacacaatgcggaagctcgttcatttacttttatcgccaatttctaagatatatggtataacggtaaaacaatatcgttgtaaacgtagatacaaatgcagttaatataagaataaaataatgcaattcacaaaagtcagttggagagaaaagaagaagagaaatgtgtatgtttagtttttagacttactactctcatcacaaaagtgcatgtgggactaatcttgagtgcaacgtaccatatacagctattgaaatgagaccgtaaaattcgtggcatcgagcagtacttttatccttcaatataaaacgaacaaatctcaaatattgctgaagcgtttaccattcgagtcaaaggaaaaattcagcctccatgcgatagtgattagtgaattcacaaattcaacagatgtgttttaagtaaaatactacgaaaatgattgacaatgagtttatattggaatagaaaaaaatccgatactgaaaaaacaagacctatggatatttttttagtttctgatttcattgtttattatcgaagaaacatgattgccaacttgatgaatgactaccgaactctttcaattcgggtgtcatgtctaaacattaacaaaaattggaatttgaatcgagcgctttatttattgaacatcaaaaacacttgagtagattatctattcctattcgtacgtaaccttatatagatgcgagactacccacaaagttctgaacttgttcaaaaatgattaagaaagttaaggattttgctcaataattgtcctaagtcatctagctttaatttgcaacgaaagactctgataaaaaccgaccaattctttcttcttcaagggctttcgttcaatgacctacagataaatacagcccaaatcaccttaccgcttgatacattaaggttcaatcacccgtacatttgccagcctacaaaatttccttatttaattaccctttactacaaatcccaacgaccgtagtagcaatctttaaagataataatttctttgaatacgttatagttacatagcaacttatctgaaagaagccgttatatttaattaattaaacgtattctagagcacgctgaactttgcattttattgtttaacgaaaagaatacgtgtacgttgtggtttgctattgaattaaccaaacggaagaaaatccaactcacaaacattgggatagtgacgcggcaaatataattacgagattctctaaaaagcgtaaccgatctgatacattagtaaacccagacaaagcgaatttaccaacttgatagtaccactaactggcattgaaatgagtgaaactggaattatcccaaagagtacagattacacggattggcctgctgatgtttgtaaatactctcaagtctttgaggatgttttagtcgttgggacatatatgttagatgaatcgacaaaattgcgacatggaaaattggtgctttatgataccaaagaagatgtactgtatgttagatcaaaaaattcttgaaaaagtactaatttagattagaaaaagagtgtttgacatgcactgcgatgcaattttagattttaaatggtaagttgccaaaacggtcaacgagcagaagttcatcaaaagaattaaaagattggcgtaaaatgatgagggtttttcgcaaccatgtgatttagtcaataatacagtatcctgtcgtaaatctacagttcgtatcaagccacggtttccccttttgactatacgctttcttgagctcatgctattcacacctttgttttgaaggctagtcaagaaggtttatttcggtgttcaaaagaaagcgtttctaatcagtggtgcaagtaaataatccgtagtcgattttttaaacgcggaaaaagggagtaattatacccatattattccacaacgctctccttttaccttttcttcgttttctctagtattttcactccatcattgaacctcgcctttctcctgattctcagttgttgctcgacgcttcatggattataccccgtggttttcttttctcgcgacttgatactaattcatcttataggtctcctcatgatgcttctgtattagctgtagctcattccaccggccacgtttctttttatcgccatcaatttcgagcagaacttatgtttttacgtggtatcaaggtggccgattctagcgtccttatgctgtctttggatttctcggacagcggaaaggagctagcggtctctatgtcaaacggaagtgttcttatcatcgatatcgactctggtgtcattaaaaacaaatggaaagagcacgattacgaagcttggacgtgtcattattctcgtcaagacaataacctcctttattcgggaggtgacgatgctgctcttgtttgctatgatcaaagaatccccaattcatgtatttggagggacattcaagttcatcattctggtgttgtttccatcctctctcgagccccctttggtccttatattgctactggcgagtatggagattttatgcatacgttggatacccgaaatattggaaagccactttttagtgctaatctgggtggtggtgtatggcgtcttgagcacatggagactactgaaaattatcataaagtccttggcattttaatgcatcgtggtgctcaagttttacgaatctctaatgattttagttcaattgatgctagcaaacgcatttttaaggagcatgaaagcatgtgttacggaggagactggcgtcacaccgatggtctacttgctacttgctcgttttatgataaaagagtttgcctttgggaagatatttagcatgcattcgtttgtttagtagactttggggaggagaataacgggcatattttttcctttttctttttttgcatgtttgctatacaaaatttgtgtagaataacgttgttcataatcgttacttttccatttctttgttttatctttacaaacagaaaaaatgatcatttacgttcttgttttcgcttctttttcttacttactgactctcttccacctgtctctgttccttcattgtttttttttttttttcattctcatccgaccaaatactatcgttctttataatcaatgaaatacaataaatgtttattaaaataaaaaaagtttaagtacgattatggcagtactattgtgttcacaaaattgtaaatctttacagtcattgccatctgaaattaacaaaatgtatttaaaaaacaaaagccaatctaaccaaatacttattaacaaaaaggaagagaaattaaagaaggaataatacagcaggatttattaaagcattttggcagcggcaaggatgagtaaaagtacacaaaaagatttcttttaaggatcttattgtattttataccttgaaaaatgggtccttcttatagctagaataagaaggacgatccatgctatttaaagcaactctaatatcggtgtgtatatcttcgattaatttatctaaaccggcataatttagctcaggcctaatgtatcccaaaacaataacacgcattatttcttcgtaaaaatcttcaccttgtctttctatgagatgcacttctgcacttcgtagcttgtttttatagtacggattccatccaacactcatcaccatggggaatactcgtttttgtaccatagcatatccaaaataaacaccagaatctctatatctaagaagctcttgaattgcatcttctgatatatttgcagttggaattccaagctcttttgagcctctaccaaagccatgaacaactttcccttcgaagcgaataggataagggctttgcaccttttcaggaccaacaatttcaggcctcttttcttctaaattaactgtcatagagtaaatcaaaggttgctagcgcaattggaaaaatactagtggaagtaggtagttagtaagcgtagctcagcctaatgaagagagtcatgttggacaaatatttccattacgcttattttaaattagtttagttgatatctatgaataacaaaaaaataataaaacaattggttcatcaaccattgaccatcaatggttaaatctcaaggttggtaataaccacaaatgctcaacggttgtttaactctattatgaattcgtaagtttaataaaaaacttgcgtttgatattcaagaggaattaaagatttaaccttaatataatagcgcttggtattcaagcagttttacagcgctgttctgggcacaaaataaaatagttattaattaaattttttgagaaacaagtagacaattgcataattattagattgacaaaaggccttgggtggcatccataaattccgtccccaaagactgccaagtgaaagtgaaattgcaattcataaaagctttccatttgtgaaaatatataggactataaatatccatgttaagaaactaaacactatccctatagctaacagccatttttttttatacatcatatttcaaaaaaagcggcatacgaacctgacgtttaaggaagtcgaaaaagagggaaaattttgcttgctgtaataatagaagaaagcaagattttttggaatataatagttgtaaactacttaagcagtttctgcggccacttttaacgttgaagcaccgctaacaatcggcccttgctgtagtcttttaagaatgtcttcccgatatctaccaaaaggtagcttgggtccgccatgaggagattccatcatggtctttaacacttgaaaccgcagtaagcatgtttcatggtcaccttctgcttcaagtaaatgacggatagcgaatccttcagaagcaatttggataggcgaattttgagcaatgtgtagcaagcattggtatgctagttgcctagaacgaggaatcggagaagaagcagtgtttactaaagtgctcaaggtgttgggaggtaatattctccaaagctgcatccacaaattatgatcaggctgtaaaagagcatgagcaaaagaagacatacccggttcgtccatcaaaaatcgtcttgtcaaccatcttggcacataacgattagcttcgtcctcaatgccatatttcttgataagtgcttgagttaccactgtgttagacaaaaaaactccgtaaagaagaatagatgtagcatcgttcgtcttcattctctcgcgaacagcgtcaaatagttgatgcttctcatccaacgagttaatagcgtctggatgcaattcgcagagcctgggaaggaactttaatccaatatgatccgtataagaatccgctgaacctttgtagtcttgagcgatcgtgtccaaatactttgttttttcagaacttatatactcgtatgtaaaaggagcctctaacattatcccaaggacatccacgaaattaatttgaagcaatatgtctttattgtcaccattaattacaagcttgtcgtccttaatcagttcttccaaatattctggagacttcgtagacagttttgcgaacagtgtcaaccagcgtaccctcagcgtagagttcataatttcatagtcaacaaatgtaaaacgctttataattaaattaaagtagtatggaaaatctgccatatcgaatagcaaaacagtagcttcttcggaaactgctatgcttcgagagttgatgcatgccataatcgcctcaaacagtggttcaccaatctccttcttttcccaatttgcacggcgtataaggtgcagacaaaagatttcgacatctgtagaaggatgttcaagtccagtaaccaagtaagattcaattccaaactttttcaaatcggcccaactcattggctcaagcagcttacccaaagccttcataatcggctcggtaggtattggaagctcaaaacaactaagtatggtatccaagagtcctaagcatgatggccttgtagcaggcgttatactttcacggaacgcatctatggcatcagggatttcacgaacgataaccgacgggtttgaagggagatctttcaataactgtaatagtcttctaccgggtcctggtaagcctggtatgagttctatactatccatttggcttgtttttaacagatcccgtatattggcgatggatcggctgaaatcaggcaagaggcaattttatctcgtttaagtaagcttaattttaaccgagcaaccgaatatcaaggaaatacacatacaaagaaaagggtatcaaacacctttgcattcttggtttacgactataactgtaggggtggaaaacaaagaaacacttaatcaaaattacgcattaatctacttcacgaactaaccattttttttaaatgagtgcctactattttgtttgagagcctatggcttgtgcaagaaaaaaaaactcatttaacataatgggtatttttgcaaaaaagctagttaatattatgagaaggggaatgattttcgtaaaaagtaagttgagagaagataaaagagaaggatggataaagagcatgaaaaaggataaagagcaacaactgatgatccaatattaacggaccaacaagtagagtggtaaaaaattatactttcttagctgaaatcattaattcagggcgaacccattcatcgaattgctcgggggtaccgaaacccaaagtaacaaactcgtgcttgagagtgctcttatttttaagagcagtcttggcaatcttggcacagttatcataaccgatgtgaggatttaacgcagtaacaagcatcaaggaatcacgaagatgacgggcaataccttcgtaatttggctcaatgccgacaacgcaatgatcagtaaaagactcgcaagcatcccctaaaagacgaatactgcttagaatgttctttgctaaaagaggtttaaaaacattgagttcacagtgtccggaggcaccagcgacagtaatagtggcatgattgcccattacttgagcacaaaccattgttaaggcttcacattgggtggggtttactttgcctggcatgattgaacttccaggttcattagcaggaaggatcaattcgcctaaaccacaacgagggccagaaccaagttgacgaatatcgttagcaattttcataagagaacaagcaataacatttaaagcaccactcatctccacaatcgcatcatgggctgcaagagcctcaaacttgttaggggcggtcttaaactcaatatttgtaagctttgaaaccttctcagcaaccttcacgtcaaatccttcaaaagtatttagtccagtacccacggcagtaccaccttgagcgagaagacaaagacgaggaagagcgttgtttatgcgctcaatgccataaccaacctgagtaacatagccggaaaattcttgacctaaagaaagaggagtggcatcttgcatgtgggttcgaccgattttgataatgttcttaaactcctcttccttacccttcaaggcccggtggaggtgcttcatggcaggaagtaaatgagtgtgaatttgcaaaacagaggcaatatgcataacagtggggaaagtgtcgttagaagattgagacatgttaacgtgatcgtttggatgaacgggctttttcgaacctaacgtaccaccaaggatttctatggcacgattagcgattacctcgttactgttcatattggattgggtgcccgagccagtttggaaaacaaccaaggggaagttatcatccaaacgaccatcaatgacttcttgggcagcctgttcaatggcatctgcaagtttgggatccaaaccgaattcacgattaacagaagcagccgcacgctttaaaactccaaatgcgcgaactaagggaagaggaagtcgctctttttcaccaccaattcgaaagttttgaagagaacgctgagtttgagcaccccaatacttttctgcagggacttgtatgggaccaaaggtgtcagattcctgtcggaactcgccatgcttaccgcctttgggaatgagatgataagtcggagtagtggaattcattctatgagtttttagaggtaactaaaaaataaaaagttagtgtcatacgcaaattgcataaatcaatagagtaaagcgaaatagatgtgactcaaccgctgcatcttgctgaaaccgcgaaagctggaactctgtgccacgccattgttcattcgcaagagtagatggaaccaacgaaagaaacagaaaaacgaagtgtattcttcaatttcttcagccgtattcgagcattacaacaaaaacaaatgccgacacatcaaaacactgaacttattcttttcataataatatttcgtggtgttagtggatcatgcgtttcaatgggataacgcacgactaaacaaggcatatcacaagagttatggaatgaacggttaacaaaacggttaaactagcaagtagtcatttaataaaaaaagagagaaaacaagtacgaagagcaactcttctttttttaataggtaactacttcgcaacattcatgactttttctctctccaaccgattttcacggagtctcattctaaaacacaaattacaatttacttacaccagtgagtgttggggtaatcaatcttctgcaaggcaaaccgccagctcgaaaaatcgctttagccgtgctgatgtgggcaacagaagccatgtgggttattttaaaaagaaaattatactcttctgaataaggcaaattttacggggatacggacaattatcaccgttacaagtagtaaacactgagatgacgaacaacctatcggaaacctgaggatggaacgaaatggagaaaactacaaaaccgataagaaaattgaaaaaaacagttttgtgtattttatttatccaaaagaaagatggtttgcaagtgctcacttcggtagaccggtggttatgagactgatggaacgggacaataactacggcaaagatagcaggtacaaggggaggactctgaacaaagtggaaacaacgtacttcacaaacgatttacgaaatttacctaaaataagagaatttgatacaaaacaaagccttttccattcaaaattggaaaacgcacaagaattacacgatcttaagagtatatggtagaaagtagaattgagtttcactgaatacgcgtatacaccggcattcattccgcgttactatttgttacccaggttgcgtaaggttgtgagctttaagataaagatgcgttacagttcagtatatagaataaggatttatgtaagggtgcataaaaaaggtagtaggtgagtacacaattcattggtatagcaggaagaagaggagaaggatgaagaagaaaaagaggttgctcagataatcaaaaatagagagaaaagaagcaagactttttttgttcgtatgcgtaatttttttttacttgtaatgagagctcaccatttgcacaagttttgcatactataataatatcgcaatttataggaatataatcaaatgcagtaaataaataacgatctgtaaaaatgattataaatgcatttgatttaccttcccaatggtgaaatctcctttctatgcattaaagatccttagacgattttattttaaaatcagaaaattcctttcaaacttcattttctatttctctcttcttatacaactaatttttagtagccaacaacttacagcaacgttgcgacgcattcgcaattcattttagcatattgattttccgcttctttaaacggtttcctggtgaacatgcaaatctggcattcccttgactggacatattaatggaaaattagttaataaactgctctagttggtagatctagacgaagcgataaacgtttttggttgctttgaacattttattttgtgtttttcttcttggattcattcatgcctctttttttgagtggttgaaaatcaaaattttttctattaatatgaatattttttttagctatttagcttaaaattgcatagttattggtacatttggaagttgaaaacgccaattttcacttgttttttctcaactagttttcaatcgctaaaaactttcgttcaatgtcgcaaaaagcctttttctcaacagtagcccttttcaaatcattgaaattatccggttttctttaacatctttaacactatcttctaaaatgttttctttcagatttcccttgtatctcaaatgtctataacatccacatgtaatttgcgccgtattatcattttctctgtttaacggaagaaccaagtttaataaaatggatccaagttttttaaaatcaattaataaatgaacaatatatctcccttaactgactttcattcagatacctcacttccatacattcctaacaaacctctattaaataatattctactcttactatatgttaaatgcctaacatttacctcttttataaaattcatattactatattgatgatctgacaaattgaatattattataatagagagccaagttttcttaattgtcgccctctgccactccaaccgaggtggtttttggttgatgaggagagcctcgtaaaagttgaaaatttttgtctcttcttttcatttttagtttaaaataatttattatagtatattgggtatattggaataccatacaacgcccaaaaatactgcgggcaaacgtggttaaaccctcaacagaaaacttttatctttcactttcaacatggccgaccaactgcgtactcttcctaagaatgccaaagttatatacgagcattgcttaaaacagatcccaaattcgctttcacaacaggatttagtagaagcgattggcgcttcgatatccgtgaacgatcttagtagtgctttaaatatccttctaagtcggcgacttttggatcctttgcggcaaggaaatgttctcgtatatcgggctgttcgattggatgaagctaaaacgtaagtcggtactcaccgaaaagtttaactgtttaagcttttcgttgttgatcaagttttaaatgtcagaaactcaatgcatttcttgatctcttattgtagtataatataaagtttttacgccaattttaatcatgatttttgttttgtcaatgctaacattcttctttttagtgtttctaccatggagggcgatgaacaaatcgtgtacagttttatcaagaattctggcaacgagggaatatggaggaaaaccttaacactaaggactaacttgcatgtttctgttgttgatagatgtctgaagtcgctcgagtcaaaaaatctcgtcaagtctattaagagtgtaaaaaatccgactcgaaaaatatacatgctatatgatttagttcctagtacagagcttacaggaggcccctggtttaccgatcaagagttggatgtggaattcatcgagaacctaaaaaaggtgatctacagatatgtacattctaaaagcttccctcccaaaaaggctgccatgggtcctgaccttgtttggggtcccgaatacaatggataccctacagctttacaaattcataattggctaagaagtactaatatcactaaggttgatctctccttggctaatgttatttcccttgttgatgtcttaatttatgatggcaaggttgagaaaaggtcggatggtgcttcttacagagcaatccgtgtaaataatgagaacattgatgcatttactgaatctccttgtggaaactgtcctgtctctgacatttgtgacgccaatagcagggtaaatcctattacctgtgaatatcttgataaatggttgaactaatgaaaagagttttgtacaacctttgcatagtccttaccaaagctattaagtgtcaaatcgatttagaatactcgtattccctaattcgcgattttttacttttttgaataaaggccaacattgttgttttgtttttacgacaacaattcctatactatcatatttacaattcgggattaaaaaaaaaattgggtttggttttttctttttataaaattaattataatttacggcttttctagttttaataaaaatttcaatttataacaaaagatttgtctaagcacattttaaatattacagtaatttcaattttttgttgtatgttttcattagtaacatcattcgtaaatgctatttttttttaaattaactattatataacaacattggaatcccgaaaaccgttgaattgctttttttctatttcaataaaagctgtataaatagtcaaattagtaatcctttgagcaacatcaatctctataaagatccaagagccgacttatggtttcaacatattttttgaccgtattcatttccggactgagagcttgatcagcaccagtctgaacagaatcttgcaatttacgcgaaagtaagaaaatagactggagaaggagcttatccttgttcgaaatctctttcagcgtaactctcattaaaaccaagataaaaatttgcagtaactgaatcattaaacgctggacaggaggcttaaggtactgaattccacctaaattgcgattagtaaattattatcaatgttaattgactaagtacataccttgtttgcacaattgtaataacatctgaaccatcaatttaatgtagtcaaaagtaagaacagagtggaccgtaagtttgttttgtgcaaatgtaattagaagacattggccggcttcaagaccactcagaacttccaatacatctttattagaggacaacaactctgaaaaggctcgtgaaaaagcatcgataaaggaacttacaaagttccgacgtagataatacttgtatagatgagtagatatatcaggggacacatgatgcaagaaatttaatataatgactgaaagttcccagcaggagccattggtatataaggcgtctttagtcaaaacatcaaaaaattgactggtaagtaagttaggtgtaattagtttttggaatgcatccttgaaaactggatcaaccttatcgcctccattagcagatgtatgtttttgaaatacggtcaaaatacttaacaatgatccataaagattttcacggatgctttcatcggattgttggcactgaatacctttcaataagcctacaataacatcatgtataccctccataaaataagtagatttgccaagctcttcaggttttaaagctccgattctccttagagcatgtggtaaaattgtctcaatgactgaactcgtcacagatactgtaccttgagtaccgagattatgcacagtaacaccaggcagcacaagtcgaagcacctcccagatgaaatcatcaaaatgtacatccgatatcacctcattacaatcgtcaaccaaaagaccagttagtcttgcccatgcagttagacatccatggatatcttgcaaaagtacaacgtgtgcattaaaggtgtttagtctctgagccaattctttcaactttgaattctgttgctctaaccaagagtatttttcctcagccgaaccccccagactagtcatttctgcttcaaaaaacaaacggtaaatcttgagtacacgttcagtgtcaaattgaaaatcactgtgaccacgatcgaatcgtgtaataaacatattcaaattaaaaccagggatattgggtagctcaaatgttatgctttgagggtcaattcgtaatatatccataaattctaagattttgaaaccagactctttttgagaaagctctgtgctatgtgttttttcatttgttcttataagagatgccacatattcatttaagtatttgttttgacctacagaggcagcataatgtatttcggtcgccagcatgttcattatctgtgtacgagaacggatgcatctggataccatacttacttcttccgaagaaaatccgccaagattctgaatgacttgctgggtaagtataggctcaccatctaccattttaacaagcaacccaggtctagctcgaataacagataacgtaacttcagaagtcagaggacaagaacataaaaaggctacaatctctaaagcttgaaccataataacaggagtttcccaaataccattaacaattgtccttccttcaataaagtctagcagggaattcatgagagaaacccgagagccaacgtagccaggctgatctcgcaatgtaatcacatttgtcgaggatatatcaaatcctaagatcaatagagcaagtgaataaactccaccactctgtttaagattattcaaaagcaattttagaatcaaggaagattcatcattggtagataacaaagttaaaaattggctttcaaacgtgcgaataaagccaaaaattatacgtttgctttcgttagctgttctaatgattgagcacaacagcttattttcatcaggatttcttttgttcatgaaaccttctgcatctaccagataactcaatatctctatggctgagcgaagaaaacatttatggcgagaaccaactaataacgcaagatgtacgatagaagaaattcgagtcataaacacctctttataagctcttctagatatagtcaaatccaaaatatacttgctaattcctagctcagctatataaggaaccacgttcttgaacaaaacacgctggagagatagaacattgcgtaatatacaaagagacgccgaaaccgttataacgatcgtcttgggaacagaaacatcttccaattggtcaaagccgtattcaaccaagtcaaacaaaccggaatatacactttcggtgtaaagagcttcgagaagagatattgcaggatgtctagtcaaataaacatgcaaattgttattttgaagattatccctgaccttactgctaagaattcgagagtataataacaaatcaatgttgagaccatcaaggacggcgagcatatattgtaaacatgcatactgtaacctgatggatccaacatcacgcattaacctccactgagtagaagaagccacaaaagtttccacgacataatcaacataaggttgaactcctggtgtacgataggaagcacccaaattctcaggaaacgttaaattaacattgagttcactcttattacgagtcaacgacgtaaggaggttaacaaatgaaatcttcatttccaaattcacagtaagtcttcgtatattatttaataatgggccacaggaagtaactggcttggttaatgatcgcttagaaatggcaggaattgacataggtgctaacccaccatcaacatcaaacaataccgagcttacaaaccaattatcaagagctgtccataaagcgttgttgaatgaaccagtcgacaaatgggctaaggattccaaagctcgaacgatacaaattctaactgaatcaggtagccgacattctaaaagttcaaacagagtagcaataggatttaaatcttgattttcacaaaatgtgcttgcaatttgagcatcttgcctcaccacagaagagaataacaagatataggcttgtaaaatcaatgcagagtcagtgtcaatttcacttggatctgtatgtactcgtgcgagaccagatgaagtgacaaccgtttgtactggctttaaatgcgatatgtagtaacgaaaaacattaaagatataagaccaacttggactagttatcattaaactttctaaatgtccaacttcgggtatgggctctgagaataattcgtatattttagatgcactagtggtattcttgcataatgaggcaagtaaaagtgtaaatgcagtaatgattccaggaatctgagatcccattgaccaagtgagaaatccatacatatcactttcaatatcgtcccaaaaatctgatatccaggaaacattataggtgtaaatagatgatagtaaataatagaattcttcaaatggaaagtattcttcaatttgttcaccagggatagaagtagggtaagtagtgtttgttaagtagcggtcttcttccaacaagcgaagggtttttagtatatcgggcatataactgacaaatgcttgtgcaaaagaacgaagctccgaaaaaataatggatgcaataaacggtcgaataagagaccagttaacggtgattctagaacgggatttgaacgcaaacgcccattccataccttcagtttctgattgacgaaagggatatacaagcagtgtaatcatatcagaaaaaacaccattttgaatgatttcatttgcagcgttttttatcgtggtctcgtaatctataaaagaaggaactttttcaatctgtttgcatgtcgcattaagacgggtaacccaccatatgccgagaatatttttgaattgagatgaacgccaatcttgggaaggtgattgaataattgcctggtggattttctgaagaatctcgacagaattagatctcaactgtactttctgatcaggaagatattcaacttctaataccttgtctatgaaagcatataaagtgggtaaaatcaaaactgcatttttatttggggagtcgtacttccttaacatgaccaaaaggctttcaaaatgagaattttgaaacaagtctacttttgcgagttggtaaagtataacagaaatagtttccaactccgcgacatgtgcctcatgagagagtctaataaattcttgaaaatcaacaacttcagatactccaagtatttggccgcccgcctcacttttcaatatctctgagactttattatctaaaataggtattgtgtcaatgcaagtcttcaccaaattattgccattttcgcataagctctgaagataagacttcagggctgtagaaatgtccgactccaagtcttttaagcctacaacccttgttaatgattctaaacattccaagagttgttctcgagctagaaaaaagaaatacaacgcagcttgaacgggagttcgatcaagattttgagacgcttcaatgccacgttgtagtaaacttgcgcattgaatttcatccaaatttaactgagtagagagagtaagagacaactggatgaactgctcattgactttgttgattacaccgcctaattcaacttcaccggattccaattttttgcgagaattagcattagctggatctaaagccaaaaattttagaaaatcctttgagtaggattcaagacattgtattaacaaacgagaagaaacatttggattgctgggattactttcgatacactgcaataagtataaaagagcggaaaagtgctgagattcccagacatccatggtacagcttctcaaaactaatgggaaccgacctgcagttgtcttaaaattaaaagagtgtggaagaatccaggttttatgatgttctggcctagttgtcgagtttggtcctaaaaggaggtatatagtaaagtagagaataataacagaatgctatttaggcagtagcgaaattcttcattcgaagatatcaactctagtacgactaaaaagttatattataatttgaaaatatcgtgttttattaccaagattgatgaaaatatttttgttaagttgcttggggagccgttaaacccagcatgcaatgccatgtgggtataaaggataaaataatatacaactaataaacaaaattaattttacaactttttcgttttcgaaagctccttgagtgaccaatgaaatgagtgatactacagtttcgaatagctcttaaaattcacaacgaaagtactaaagtactataaggattaattaaaatacaacttttagaaagagtatttgaattaactttttcctcgtctaccatacctataatctctaatttgctataataactgttaacttaatttaatttactcgttgtaccttcaatgaggaagttcagagttcatagcagaaatccctttcgttcattgtattttaaaaccctctcttttcttttgtaaaatattctctattcatcccatgtgtgttacagtttcaatggtgattacagacaagttagagagcccaaaatcttcagtatataacttgctgaattgcataacaaagggctttataataaaaagatttccaatactttttaaatgcgactgggcagctgtacaattgaatgttcagcatacctagtgcctagtgtaaacatttatcgtgagaagacaaattcgatgcggtggaaatcgtaaaaagggcaatcataaatacaaagaaaaatacaaaagcatatcttttttaaaaaaaaagaaaacttagagtagcattggttttaaatagttgtatgacttgtgttcaattgcgcgcttcgtgcttccgatcactagcacaccaagaaagtctcttgtttcatttttagtataatctgttacatttatcacgtttacttgttattgaagcagcggccgtataaatcacctctacaagtctaaatatactcgatattataataatcataaataaaccttgagctagaatactttttaaccttatatatataagtacataagttcaagctctcattttggtcataataatgataccaacctgttttgtaacaaccttaataaacataaaagcattcaattcctaacaattatataaagagcacaagaaaagtgatgctcaaagaattttacttgccagaaattaaaagttaccattatcgcttttagcttcggcggtcatagtgagcttggaaaagttcagcatccatgagagtaaacgatattgcctactcattaataaatataggaatttagcaattatataatatattgaaaaataaataatttatgctttcaatgcctttattttactttttataatggaaataccatttgttataaaattccaaacattaggtaacacacattaccaagtaacaatatggggattagtgtcgtttcgagcgtatctaaagtcttaagtaaatcaagtcaaaaactgggttgttcaaatatcttcgaaaacgcgataattcacgcgttatttttttaaaaaatagacattcatatacatttttattataaaatttaaaatttactgtatctttggatgcccggaattttcattaggaagcgcgactcgacattcatttcatgctagccaaagatttaacccaccaacaacacaacacattcttcatcgatattcccctatagaatacgaattgattgtcaaagtgttcgttcgttgaaggaggaggaactcttgaagctacgagacccaagccattgtctccccttcgcgaacaatgatggaaaagtctctgaacacggtaacgtctttacctcgtatgtcttgcttttccagctaaatggctttgctctttagctcttcatttgtctttcataattttattcattttttctaatgtttgtctgtgtttagttcgtgttatttattgtattgatcgcgcatccgcgattcgctgtttagcaaagtctcaacatgctgtgcccattcaggtgctgaaggaagtggaaccgaaaaaagtgatttgccaggtagacattcagcatgttatacaaacagtttgccgctgtagtcctgaattgagttgcaaatcacaaggtgattttagcgtgtattttttagaccatacggaaccagatgaactcttcgtcggactaggctattggtcttctttgttgttatctcctactcttaatgctggcacgtcaaattccgacacagtttgggtgaatgggtttattgtagagttcggtattcaacggtccatagaaatcaagttgagattccaatccttgcagaactccttcgaggttggaactccagaaacacatacgtcttctaaatttttatcttccactttacctccatctcttatatttgatccatcatcttccgaaaaatccgattctatttctggatctttgtttgatacgaactatacatgtcctgtcaacataaacggtctttccaaacaaaagtctgtccgcgaattaaaatctccttcacgtccctccgcattagctgaaacaaatgttgaagagcttgagttagattctttgttccatgcgtcaaatgacatttcatgctctgcaacttctttctctgagccatacatactcgatcatcaagcggcgcttgaccatcctgctactgaccctgtatgttctgcgtcgtctactactgtaaattctgcagtaagcacaaaaaaacgccgacgtgaaagtagcaccatttcgccagagtcggcttatgttgcagctcagctacaaaatccatctgaacgtgaacaagttcatgaatttattaaagaacaagttcgaatagctcgtgggcgcattgagaaaaagtttaccaatgtacgtgggaagaatcgaattgaagaacaacttaccttgagcttgcaagaagggaaaattccaccatattgtcaaaactgtggaaccatcaaaactgccaattggcgcaatgctacgtacatgaacataactttgatgctttgtaatgcatgtggtatatattggacgagtcggcgctcgatgcgtccaagaaatttatggtctacctataaagcatttgaaacagagaaaccgttggaaaatgatgcatttgctcagcttgagttagccgtatataaactttcccagcaacgaaaactatctatatccatcttccgtgagcttgaaaatgcaggacggcactctcctctgaatagacttacgtctttagactcaacacactctgcacctgatcccaatcatatctcaaaaccctctgttgttaatcagcagaaatccagaggaggtccccgtactgctaagctgaaaaatgacctcagacgcatacaatcatctcccattgttgcacctactcctgatacatcatttcgtgagcctttatccgaaattgggtctaatgatagttggctggtattaccaaattcactaagtgccaatatacaaaatgatgttttaagaaaaactgatttcatgtgtactgacaaggaaaacgtcgcttttcctttgaaaaccacaacaaagcctatgcctaaagtaaataaagaagagacagagccaactctgcctgtttgcgattcagaaaaagaaaatgatgatttagagtgctatttcagaacccctccaaaaccaactaccttacaaaagcaacaacaaagtccatcaccctggaggtcagagttatttttgtctgaccctgaccaaaacgtattgacaccaaggcataagccaaagtttgatttatcaaaggcattgtcttcggttgcaaaatccaataacattgagaattcacctcaattaccagaaagatatgatttttctttagaattggggttgaattctcaactcgataatgaagaaagacgcgatattcctctgatgacagatttggtgatgccaagtagtccgcccatggtccctgctgacaggcatttatccgttgaaaacacttgttgaaagagcgataaaggcgtacctttgcttcacacattacccttgttctttaattttttgttttatcaagaagtcatgtgtgatcaaaattgacatctttcattattcgagtcttcttgcttttttatgatttttattttgataatgacatccttaattcgttttcttaaccgcaaaaaaatgattgttgctgttaaagtccttactgcgtaagaactcccaaggcatgtcccctcaaatccgtccttcgttctttttatttctaaagcaatttattttattttctttcataccatgagccgttattacctcccccttgattattaaaatatttcaagtcgttgcttattgttggcggcatagccaagagcatgcgacaagcattctataaatcttgtcgcaaaatagaagttggacactatttcttttaatcttctcaaatgttcttcgacttcatctttgaggctcggtttatggaaattttggatacttcgtgatagttctgtctgttttgcttatacaaacaaattataatttcattaattgtattatgaaagccgatatggacaaagccacatccttattttacatacggaaaaagttacttttaattatttatatgaacactgttattcttgttagcatgtttatgttgcgaaacgtttctaattgattattatgggtagaccggataattgatatttagcaaattcactagacgaacacatgacaaatttttttcagtaatgcgaaccaaagtcacgcgaaagcaagtgtaaaagtcgaaggatttcaatacatggttcaatatttttgtctagaataaatcaaacgtttagttcatatattcaaaacaacagcttattgctgcttactatttctaattttctaatagccttttgttagcatttttgtattataatgtagttcaatgcagagcggataacggtttagtggaagttaacctagtacgtaaaaatgatttccgaagatctcggtataccacgcgtgacgtaaatgcccgagtttattagcactgactgacttaacaagtttatacttacgcagaaacccaaggaaaatcggtgtttctcgtatatactatacaatcagcaattttatacctgatattataattgaaggtatttagttaatttgaaaagcaatttttttgtcggtactgaagtgtttgaacgaatatgaagggaagccatccaaatgcaggttccctgttggaaccacttcacaagttgaacccattttctgaaaattctacaagtggacatcgaaaaaacgctagtgatcattcggcggatggagaaactcgaccgattgcaattgagatgaaggatagtaaaggcaacacagtcccagttggtaactcgcgccctagtaaagcctctaactggcttgctggactgatggaggataaaaaccaaagatggcgtaggtctatggaggatactcatatttgcttgtatgattttgggggtaatcaggacgacggcttcgttgccgtttatgacggacatgctggcattcaagcatctgactactgtcagaagaatcttcacaaggtacttttggaaaaggttaggaatgagccggaccggctggtcacagacctaatggacgaaacatttgtcgaggtcaacagcaaaattgcaaaggctactcacaatgacatttgcggttgtaccgctgcagttgctttctttagatatgagaaaaaccgcacccgccgtgttctctacacagctaatgcaggtgatgcacgtatcgtattatgccgtgatggtaaggctattcgactttcttacgatcacaagggatccgatgccaatgagtctcgtcgtgtgacccagttgggtggtctcatggtacaaaaccgaattaatggcgttcttgctgtcacaagggccttaggtgatacctatcttaaggaattggtcagtgcgcatcccttcaccactgaaacccgaatctggaacggtcatgatgagttcttcattatcgcttgtgatggcttgtgggatgtagtatcggatcaggaagctgtcgactttgttcgcaatttcgtaagccctcgcgaagccgctgttcgcctggtagaatttgcattaaaacgtcttagtacagacaatatcacttgtattgtagttaacttgactcgcaatcccggtgatctcgatgattcaggacttaccgctgataatgattcatacagtaatgactattattaggtatttgatggattcaatgatgtgctttctgttgtttcgtaacggtttttcgatgtctttacctcatccacagtacttgtttggaagccggaatgacttaatcctatttttttgtttaccaagcactgtaattgcatcgattcttttcctttatttatggaccttgtattctcatttggacatggttttcctttgggtcgacttattttttctaattaattactcttctttttataaaccactttgtgcatgtttctcttgttcttcttttttgtctaaaagtaatgtgtctaaatatcgatcctaaatctgtccaaatctagtttcttttttcttttttcatgatttgctaccttttcctccaatctgcgtgccactgttcgaatcaatcgtatattcatcattagccctcttcatacccatttaaaggtacaaacatttcactctttttaaggttcttcgtgagtgttttcggtatttttatttacaattgcttcgcaaatattatgaatgtacttgcgtgcatgcattggtgtttataacaaaggctatacgttcaccaaaaaaaatttattttacccttttatcgtctttaattttcgatttaaaagtcgaattataattattattctgaagttacgggttgtctttattttgtcccgttcctgctaaaataccatttgcacgtaaaaatatatatacatacactaattgtaccaagtattcgagattttagcattggcctaaacataggaaaaagacaacgcttttctacttactgtctcaactctagttttcatacataaaggtgcagagcaatacaatcaaatgatactcaccggataaagacatgcaattgttttttataattaccgtttataggttttttgttgaatgatctggaaatgaatgactatagtaatagataataatacatgaaaaaaacattgacaaattgaaacaaccacgttaaaccgatcatacatagctgaactgaagtcaactcaactcattttgtcatggtgaagtcaaagttctcaccaaacaagtcatttatgctttcagtggttggaatgtctgtaggaagatttagagcgttgtcaaacgtattagttaaatgcgaagcaaagctgccatcattaccgaacgcagcactgtagttttcttgtgcttgcaagtcaattcccatttgctggttaggaaacaaagaagccgatcctgcagtacttttattttcagaagatggggagccaaacaaatccaaattacgggaaagagctgaattggaagtaccaaagttgtcttgcggagaggtagaagaatttccaaatagattcggtaataaaaactcactggcctgcagatgagcatctcccgatgcatccgtattcattccaaattggaaggaatcgttgtctcttaaataattagaaaagtttgagcctccaaattgctgagatgcatcctttgttacgtcttgatcatttacagttgtcttaggtggcatatttggatctgctaaagtcccattagttgtttttggcatcctatcaggaagctggattgatgattgttggttcaagttacccagtaactgactttcgcttaaagaaacctctcccggtttcgaaatgttctcagaatcaaaagaggaagtgaaaaagttattgcccgagggcaaagatacattgccttgaagactgtttgctccaggtggagtagcgctcacgaaagacgcgaactgagatttctcctctacctcttttgcttccaaagatcttaaatcgcgctcaacaacacgttttgcttcaataatgcgtatttcttccaaatcgcaataatcctggaatttttgacatgccgcctgcaactgactatggtaaagagcattgggaacattagccaaaagggaacgaagcaaataccctacatttaaaaatatttcatccagtgcttcacgaaggggcgtattaggttcttttactccattggacttttgttcaccttccgcatccatggaaggaataacaaacaatgggagttctatgcaatcacaaagctgaatagatctgaacaaccttttagttaaataggatgttcaaacttttgtgaaccagcgaactctgccctagaattcgcgttcgcgtacgtagcttgtgtttggtggtgaaggttgaggctcctctatatgtggtaagatttcatagttccttaacgagtttcaacgcaattctctatgcaccgtctcgtaatcacagtataacaagcaatagcaaatgttcattgaattcctaatagtagaacggaaaaggggatgctcattcgtgtaaccattcaatataaattgaaacgaagttgcctgttcacactagagctttgaaatatcatctttaggaaagaagacgcatattttacggaaacgtacaatgcacaaagttagacgtcttcttgaagagcaagaggaagtgtaggttgtttacgtttcgatgtgacaaatctttggacataacggctgtccaacagcttggagaaaaacatatagctaaggataaagtaaagacaaaatcctgcaacgattacatatgcaaggtgacggttagcccaaaggataatgcctgcatcgttattatgccatgacgatccttcataaaaggtgaaataagagtcgttggaaaacttgtaatccctttcaagtaaaacacgaatgtggtcgtaaaatgcgggtgggttgggtagttgtcttttgtacttttcccagagaaagctgattgaaaggggaccggtactcaacatgatagtcaagtagggaagccaatatgacttcgcatttttttcgaggttttgaatgatcagttcgaagtatggatgatgaggaacacttcccataacatcgttggaaacgcctacagggtcggtcctgcgaacccatacgggataatagagaagactatctaaccgttgacgacatccatcgtccaaatcaatgtaatttcctccataatgataaagaacgaagtaccgaataacatccgctcgttgaacattgaaagggtaagcatcgaagtatggcaaaaaccaaggatagttatcagcaatgaaattacgagacatttcatcagtccaaaggatgtattcgtaatctgggtgtaaatctatgcagctctgttgagcacctttccatccttcaggcacttctgtggttttccaggtttgatgaatgatttttggaataacaggttcccctgaaatatcgttcaaggaatcaagtttcaaagttggcaacggttcatctttggaaggaattgaatcattaagaacttggcgtaaatatcttagttcttcggaaggaatgatgtccttggtacatctgtctgcaaacatcaagaattcattgttgaagtaaagaacgatggaactcatcaagaaaaagttgacggcagcaaaaactgcaaatttatatatgactttcaccatcctaacagttttctaatatcaacaatgggttaacagcagaaggggcaaaagtatttttaaaaagatttagaaggtttgcacttgcaatccgaaaaacgatagagtgtaatgtatacagtaatgaatggagagacgaacttgttagcaacgaactatagtccaattctaatggagactgttctgaagaaagagaaaacgaaaatggaaatgctaatctaaacaactagggagtaagtaatccttagaaagcttcaaatgctcgtgacagtactaaatgcaattttataaggatgaatcaagaaaaacgttttgtttttcaaaagagaaaaacagaggaacttttttttttacttttatgtttattcaaagtggaagaaagatattaccctttcaagacttcagaatagtaaacaaaggcttcagatgatgcgaaattttgaagtgattgctattattaaaggagttttgcttgataaaataataaataaaagccactctgtctttgtgttcaggcatcaccatgacgataaaaaaaatcatgctattatttttttcgtttacactgaatcttgaaggcgtctatataaaatcatacgagaagaaattgaccaaaactaacattttgtaaacataaaaagagtgatattttgaaaggcttgatgtaaggaaaatttggtaaataacagccatgtaaaacggtttaatcttttttgatggatctttgaaaaaataagtttccacaatcacagactgtaatgtgaatatgatttcttaaagatttttaaactgcgaattttttttttgttgtagtaagcggcgcattaatcgatttcaactgttgcagttgcctttaagaaagtattttaactttaagcccttctcacattaaaggaaagacatacatgcatgcccgcgtctccttaatcaatacaagtcggtttccccacaattttttttctcaatacactttttagatttcgcaccgaggtggcgaaagaaaaccagtcataaaaggtccgaggttacagtgtgcattattaccaattttccgctcgttgcagaggagtgtttgatagctgagcattgttcactcctaggaatcgagaccttggagaatatcccttcggctaagccatgaatgttaccacagtgactctggagggttgttcgcttcttgttggtaatgtgctttaagcttgattttttgcatgtctgtaaacaatggagcagacagcttgatcatcaacaagggaaaggtttccacgtttgcggttccaaggaggttgatttaaagtcgatgaatatatggagatcgatttactcagtttttcgattaaaagaatactcaacctgagcgcattcattcatatctacagtcgatatttcagacctgacacgtttctttgttattaagtcaattaccatttttgtatattaacggctgatttagctagtaagcaatcgataacaatgtctgtaaagaagccatacaagcatcctaattgcacaagtgttattcacattaatagagtagctattgttattgaacaagaaaaaggcaaaaaatcaaagcaaaacttaattcccagctgaaagagtcaaatataatagccgtatgacttttggtgtttaaatgaaattgcagaataaagcccgttagaatcatcgtatatatatatatatatacctactaagaaaagtgcatgaatgagcatttaccatgcatgcatggaattagaatatactatatttgttgttaaaataaaaaataaagaactgtgttatcaaaatcttgaatgtttgattaaaattttgcaaagacccattttagcaaatgctattttgtgtgtttacttttcacataactattctttttttccctttaaatgtttttattccatcatttgtaatataaagacatataaatctactgtttctatatcaacttgacctattttccttctcagttttgcaaatttgcaacgttggtgaattcaaagaattgagtacgcgaagatgatggattcattgtgtttacacttcccgggactataaaaatacagtaagcatttacattttaaaattaactctaaaagtactcgtttttggagctttgaaattggacacgttcttcttctcttccctcttcatgagaacacctccatttcgcaattaatcgaaaagacagtttttgaaagatgttgtttcctcttggggttttaaaagttaactaacaagaggtatccaaaaggataggacaagcgttactgcagaattactattccagatttaacctgcgtattatgtttcaacattaaaaaaaaagttcagcagaattaaacaatcgagtgtgacctcgttgtaagtctttagaaacgatcatcaagcttcttttctttagactatattcactagtacatggattgacaatcttgacactgtacatgaaaatttctatcccaagccgtaattatatggctttaatcgacaagaatacttcgttaaccccatcatcggtgtttcttgtgtttcaacctttaatgcattgttataaagtctttgattggaaagttatcaccagtgttgcgaacgatgttaatatattgttcttgtattaagcattttgctgcttcgaccatcgacacacctcttcctttactaaatataaacaacttccagagtatttgccttctctccatccttcatttcagcatgactttcttcaagtcaagtctttgagcacatatttccttcagctcgtacacgttcttacaattgttttgtttgaatatatccaacacctcgtttgcaacaaccgtcgacatgcatctccaatggaagaccgaaaagtaaacaaagcaacattttacttgtttaccttttgttgcgtcattatttgctctttttaaaatagctttgatacctcgtttaccaccgtggataaaattttgtctggcttatggatgaccggaaactagtcgtctcatctcattttcaatgattcaattaacagtttcctataacattggatatggatttttgatggtgccttaatgtgtacatctgacacatcaaggaggtactaaagtaatgtcctttcggaaaatttcgttagaccagatattggcctgttactcaaaatttacacaagtattagcgagctgaacgaatcctgctttgttaactaattatgtgttaacgcatgaaacaatgctgcgcccatgtgcacgtgacggtactctcccttccctttgttgatgaagagccgaggaacccgccctcagctttacaaacctgcctcctcccaacaccatcccatagcatacaaataagtgggactttcaagttaaaacttgttcaaaggtttctaaccagtgtttttaattttaaatagaaacactttcttttcataaaaaggtatgttcttttttatattgttttcgttagtatatggaaattggagtagtgaaagaaagaacgtggattccttttgtgatttgacgtttcacttgatatgcggttgcgtggacatgactaacattgaaaccgcatgctagagtgtccctttttttccttgttccatttttttctcctcttgattattcccttactaactgagggttgtctttttagttatcgtacaatatgaaggctctgattctcgtgggtggctttggtactcgtcttcgtcctttgactttaactttgcccaagcctcttgttgaatttggtaacaagccgatgatccttcaccaagtcgaagctttggcagctgctggtgtcacggatatcgtcttggctgttaattaccgtcccgaaatcatggtagaagctttgaaaaaatacgaaaaggagtataacgttaatattactttctccgttgagaatgagcctttgggaaccgctggacctttggctcttgctcgtgacattcttgctaaagaccactctcctttcttcgtcttgaatagtgatgttatttgtgagtatcctttcgcggatttggcagctttccataaggctcatggtgccgagggtactatcgttgttaccaaggttgaggagccttctaagtatggtgttgtcgttcattatcccaactcagaatccttgattgagcgctttgttgaaaagcctgttgagtttgtatccaacagaattaatggtggtatttacattctaaacccttccgttcttgaccgtattgaacctcgtcctacctcgattgaaaaggaagtctttcccgccatggtcaatgacaagcaattacactctttcgaccttgagggttattggatggatgttggtcaacccaaggattatcttaccggtacttgtttgtatttatcctccttgcgtaagcataagcctgaaatcttggccccagctagtagcaatatcatcggtaatgtgttgattgatccctcagcaaccattggcaaaaattgtaaaattggtcccaatgttgtgattggtcccaacgtaacgattggtgatggtgttcgtctccaacgttgtgccattcttaagtcttctcgcgttcgcgaccatgcctgggttaaatcgagtattgtaggatggaactctacccttggatcttggagtcgtttggaaaacgtgtccgtcttaggcgacgatgtcgttgtcaatgacgagatttacgtaaatggtggcagtattttaccccataagagcattagtgctaacattgaggttcctggtactattgtcatgtaaaagaattcttagatgccgcactatcactcctactgttccattgtccactcttattttctttctttctagtcctttgtctttgcgtctttttttctaattcgctaaagtaattttaatcactcttcctgatttatcactttctttctatctccttctttcttcgccttgttcttcttttactggctttggaagaactcgtgcattttacttgtgtttataggtgcatcccagttctatatatgagatatcagtatgttgtttcattctcaacttggaattgaatattaaaagcaagtcaactaataaattcacatttgccgctatgttatcaacgatctatgtaaaccattgccttttctttgtcatgcttcactttatttatcctgctgttttggtattactgtatcaaacaaagatttttcttttgaagggatggatagatttatttaaggcgttgatctactatttgtatatagtgttgacagaagtagcttcgtatacacatgcatagttttcgagctgcagttatttaacttactgtgggtaatactaatctatgtttcttatcattttttcaattcaaaccctttaatctgtaaagttcttatatactggctaccacacgtaacgcgtttgtgaaaatgtatgtttgcaactacttaaaatcgcctttgcattcaattaaccatgttattcaaaatgcactagataatagaaataaatagcattattcgcgatatatggtaccacgtacaattgatcatacaaaattaaaccgtaataagtaaagctatgaaatgcggtaaaacttcaatagttcttgaaaatagtacaagaaaatacacgtaaaagagagtagaaaatcaattatcaagtttataaggataagtattttaaattcatttctcatttgaagcctttttgggtttggttcgcacatacttcttcttctttaacgaagggtttttagacgggcgagatgggcgatgctgcctggatccatcgtttaactccggaggagtgtaattactttgcttaaattttgtttgccttaaagaaccaatatttgtgtttccagaaccaaaagtaacctctttttttacagcttcagcaaactttgagtcagtggtaaacattcttctccaaccctctatttgctcgtgggtaagtgaattgtcaagtttggcaagcaaatccgcgcgttcctttgattttctggctttttgatcaaatacctctggattttgttggtaaaaatcatacaaagtttgattaataaacttctgaaaatcgtgggcgtctttagaggatgcttcaggatcatcatcaccgacacccgaatccacagggcccgtagtatcgagatcatcataagtatcatcgtattcatcgtcttcagccatagcaagaaggttaagtactcgagacttgtcagtttcgggaacagatttcttccagaaatttaaatcttcgggttttttatttaggtagagtctatccggagatatattaagatgagtaatatcatcctcttccgcaactgtactccttgtctttttatcgctagtacgatttgaaataactgcagtgactgaagagctaagagaaagaggagctatagcttttttaggttgtttgtgcatcgaatcaacgttaggtttcgtatagataggcgagtgtgttgaagagtcaagctcttctggtagtgaggaagtaattacagattcacaggcagcatctatattccccagcgaggctgataagtgttcaacggcctcttcgaccgaaagctgcggaaataattctattaggcttttaacatccccggggtttatattcacaaccttgttaattccttttgatgctacgtgggaagaagatcgaccgcttctctgttttctccaatcacgaagacctgagtcaagcatcatgcgaatttccggattgccaatgtctttcaagcgacgaaaaagggcttcgtcttcgaatactacataaatacaattccttaaatctaaggagtctaaaagcatttccagataaaacactagagagttatcggaggaatggtggagggaagtttgaataagttttttcaaccaaaattcgttttccttagcttgcaaagaagcaggatctttttccatctctttaacgagatccgaaagcactggtagtaaatccaaaattgcgggataataaactgtcgagctgacacactggcaaactgtccaaaccaatacgagcttacaaaagttggcatctcgaaactgttgagagttttgaaagcattttgtaaacttgaatgccatatcgtctgaagggatttgtctgcacaccgaccaagcatatgcatgattttgtgaagacaggagaaagcacgcaaggaactgcataacagtaacaggaccaattttctttaaacaaccttcagttttgagacatcggtcaaaaagaaaaatacaatttctttctccctcatcttcctctaccaattgaccattcaatgtttgacaccagaaggcatttattaactttgaaatcaattccgtagcagcaggagcaacagagggccaatattcgtctttaacatataacagcttggaaactacatttttgctagacgatatgacattctcagacattgcagcgtatacgctttctactgctgtgttcgtgctctgtagtttctatgtactagtaccagctgagtagcgacgtaccatgattttcggtaattcataactacacggtgcagcgcttacaatgcaatgtgaggttaagccgcactacaataggctgtttataagagtacaattcatcatcatatgcccttatttaccatttcttcaaggaatttatattcaaatcatcgtttaaaaaaaatttatttcaaataaaaaaagggagtcgagtcagtttaattatgtgctgacaaactgtgcttataagatgtgacatttaacagtactcctttaacaatatatcattcacatgaaacagtatagagacttaaaaagactcatcgcatcctaacgtgtatataaatgtcagccacgcagtttggtattgttagctacgcagtttgatatctgttttaacgatatatagaactgcggtgagttttagttgcgacctacaatgttgcggtatgcaatatgataaattaaacaatgtgatatttattgttataagaagtttgttagtatcggtcaccgatatagctcataactgaactgaggaacgaggttcggttgtagctctatttataatctttctgatagttactgtctatgtagataaacagatagtttatctgtgtatcaatagcggatgttcagtagtatcttaacatctgacatatagtgatacgcaacgtggtgtatcttagcgtcgtgtagtattgctgacacagtaaacccgcatttgcgtattaacttacagtggcatattctattatacagtaacaaaatatttcaggatctcaaaaacgtttaaggaaatctaagttggggtgaataaaaagggcagtgacaaaattaatgtgtcagaagcaatccactgcctcgttcagttttttcgttcttctttttttatgccattgtttgaaggaattagttggaaatttgtttgaacaattttattattttgttaaaaagtctttaaagcgattggaattggactacagagtgaatattcttgattttgctgtttcgtttgtcgcaatcacaacaattgaactatttgtgtgtatatcattaaataatagactgtcgttagaaaatgaagaataaatattatcccttgaggtcgtctatggatgaattgagtgcaaaaaacgataatgaaattgatttggaaaaaggtcctctcccagaatacaattcagaagatgggagcacattgcctccatattcaggtaagtgttgtgttgttggtagataagataaagaattgagtgtgtcaaggattatttgctgtgtctgtttgttttgatttacaatgtttttgttgtgtttgtttgtttacaacttgacatattacgagtataaattcgtctaacaggcacgctcttttttcctttcccattaaaaaatattctaaagttaccattgaattttgctaacaatatagaaaatataaatttaaaggatcccaaacaaatgggagctaacaaccctaacttatttaatacggacgagtctacgactcctccggattatggtgaagacagtctttctattacacatagagaaaaccattcttccgggacggcagataattcttctacctctccgttgaaaaaagcatttttatcattcatttcaatctttgtgctaaacgtacccgcagtttgttatctaacgtataaggacgctctctttaaagattatggcaaagatgaatgggtatattttgcagtgtggtgtgctagttgcctaatgatttttatttctttatggtgtaagtgacacgataggactattcttacgttcagtcactaactcattagacttctatgaaacttggatcaaggcagtcaaagtaactgtaattttcttggcacaatgtataaaggtgactgtagttttcttggcacaatgtgtaaaggtgacttcaatttccttggcaaaatgtgtaaagttgactgcagttttcttggcacaatgtgtaaaggtgactgcagttttcttggcacaatgtgtaaaggtgatctctattggccttttcaacataagaagagaaatgatgattataatttggttactctggttaatcatttgttgtatactctttggttgcgtcaaatctggcgatctgaacttaaataaggctctcatctattccacatgcactatttcggctgttttacttttaattgtatcatctggtaagtgaagttacaatgctaaacgctgacaaacagtttgtattccattttggacattcgagcgtacgttagctaagttggcaaaagtgtttttgttacaaagtggtatcgtgttggtactaaacggtacgatgtttttacgtggtaaacattttgaatggacaggttgtgaaattgaagcctctgtgctatttattatgggcaatgttctttttctttgcgaaatgggttcgttaaatattcttgaagtttactctaaccatgccagaatgtccaggtgcactcataagaacacgaaactctatcaggaatggtatagcttttatattaggtatgtgtattcaaccaactgtatgaatgattctttacttacccgattagaaggtgcagggagagcgattagaggtgccaacgataataatgacattcccttgggggaaatggaagttgaaagcgaggtctaattgcgttattaatgtagttgtcgctccagttggaaaacctctttacgacaatcaccaacgcagagaagctgcggctttttgaaaaataagcaccaacattctttaattattctctttcttcataagttaatggaaaatatgcttaactcattctttcaattaccaaaaatcgccaaccaatgcattctacgatgttggataaagtgcattgaggaccgagtctttatttattatgtatgcgagtctaattatttgtcttttttaatggaactcaagtcacaaacaataatgatttaaattgtttacgacaacttaaaatcaactaatgaaatcgaaaaactcgttgttccgccttgttaaattcacaatttcattgtcgttattacgttcatttctccttcatcttgattcttaatgaatcaagctcaattattattttttccttttgtttaatggtttacttaatacaaatttcaatgtttacgaaataatgaacagcataataaaatattgtgatttagaacgatggtttgttatcgtaatgattatagcgaatcgttgcaatagtgagtatttaatgttgcagtaaatgtatatactggtttatggtgcatttccttatgcatgattaggaaagctaagtgggtaaataaaaagggcagtgacaaaataaatgtgtcagaagcaatttactgcctcgttcagttttttcgttcttctttttttatgccattgtttgaaggaattagttggaaatttgtttgaacaattttattattttgttaaaaagtctttgaagtggttggaattggactacagagcgaatattcttgatttcgctgtttcgtttgtcgcaatcacagcaattaattcacgcatgtgttttattaaataaagaatgatcttgatgaaatgaagaataattacacttccttgaaaagtcctctagatgaagaagatgaactgaagacagatcatgaaatcgatttggaaaaagggctacttccagaatataattcagaggaagagggcgcactgcctccatattcaggtaagaattgtaaataataagaaaggaattattcaattgaaagttgtaactttctattgctgtaaaataatttggatgtgatcattgtttacagttggcatatccaacacttgatcattttcaaacatgcgcacattgtatttactcatgttatcaactcaagataaatcattcataattgagatatacattttactcattctttaaatattacgctttaggctaactataaatgcagacatttcgaaacttgctaatcctgtacctgaggattcaagtacaggacctacagaaattgcgaatcccaatgtcgaaagaagacaagaattcaaagattcacatccaaatatatatttccttctgagactactaatatcagttcttgcagttagtgttgtcttttttactgcatgggtttgtgtaaacccgttggagaagtcgatattcggcaaggtagctttctccgtcacaattggtataacatgtccaatattgtttattgctattttctgtaagctatgcatgaagttgttaatacgttcattcactaactcatcagacttctatgaaacttggaccaaggcttgcggaaaaggaatcaagcactttttaaaaaagtggagaaacatgttttttactttttgtaaaagtcctattttttgcttggttttattaaaagctgaaaacaaattgagttcacatttaggtgatcaacaatggggatggaaatgctcggcatccgctttcactttcatggctgtatcaagcattctcatattcattgctgaaacaggtttgttgtttactaaacataattaatactaacgatatagtggaacctggatcttgctctacagatttggtgaaaagagtacaagcatattgtggtaaatttgataaaaaaacatataactttaaatttgtttgctaatcatcattagattatgaggccagacagtacgcgagcagcaatactgctattccgttacgtgagatgaaccctgaaaatgaagcctaattatattgctaactttactattgatttataaaggcgctcttctcacgaaacttctctacaagaatgtgcaatggaaagaagcatctatttaattgtgatttactaaacaaatcatgatgtgtttagagtatattacactgtatttttgttgtatgatttcatttcctgaggaattggatgagcaagtgcattgcttaaaagattctgcaacattgagtcttaactatgtttgcactacatttgtatctattgccactgaacttgtctgtgaaattacctgctaattctcgctgaaagcagcggttctattgacactctcagatcaactattgaaatctagctacatttgctccacgttctgctttgaaactcaaagatcattcgaacctttcaatgatctcggatttaattaacagttcgttcatctatctcatatgaagaaagaagtttactccctcattgtttactcaatagtgatatagtgtacgagttgcgaccacgcttgcccacagcttaaataaaaggtatgagagagacatcgttattaaaaatatctgatagttaacaaacaatctttaatggttagctacgtagtttggtattcattttaacgaaaactagtagtgttttcttgtgatctattatattgcactacacaggtaatataagtagctaatgaaaataggtattctaatatgaaggatgttcgttgcataacactaatcactgagttaaggaacggggttcagttgacctcaatttatagcatttgaaacggctataattttaaatatatttttcttataatagatgatttatatccatcttaataccttattatgtaaagttggtagagcaaatagaacattagaagatgtgacagatagtgatactcatcgtagtgtatcatagcttagtgtagcattcctgacactaatctagttttaagattgtggtgggctgcagtgatagtgtgaatatttactgaataaaatatatatcaaattttttggtactatatgactcgggataagtattctaagcaataaataagtataccttaaaccttgggtgataaatgcatctttagaggggcctaattgtagtattgtcaagcaatagaatagaatagccagtaagaaatttttacaaaggtctcctagaattaggtatttaattgataatagcatcaatcaatgtcaactttaaaccattaaactaattttaagctacgctgctaaaatatgtttactatatatttgcatctttttgatttattcgtctaggacaatgatccatactttggtataatcaaaacgacgaacaaatctttaagattagttggagcacgaaaatacagaccaacaaaagtctggatttctcgattcagttgttagcacgttagacgtaaatatatatagcactacacagtatccctttaataatttgaatatgtttaactagataataattgtacaaggcaaacaacccatatagcattatatactaagttaggagaactcgccgtagtcttactgcatcgttcaaatggtttacaaaacttggtaggtagcacgtagtacgtatagtttaccgaacaattgctagagacatagtttgctattgatacagcctactaactaaagcaaaagacatggtaaaaaaaaaaattgtgcaagttaaacgagtctgggtttggcgttggtaaataaaaataaggactcttccgaaattgcttcaagaatctgaccgtaatctttaacataaaaattagttaaagaccgagtaatgtggagaggcgagctccgaccgtgtgcaagttatctggtgttaaatatcggaaggctaacagcatacgatattttttgtaccgaattaggcatcgtcatcctatccgtactgaggcaatatagtaattttgaaagatgcaaggaaagatgtgccagatcaattcatgttttgagttttgagttttaacaatttcataggaatagattaggacaaaagcaaaaagatggaaaaaagccggttggaaaccgaaaaaaagcagatggagttagcagtgctagggtatacaaagattatatcgtatacagtaagccaacacttactaattgaaattcattcattgaataattgattgattactttctttaatgatttatttttcaatttgtttcttcctcccttcacttaaattggagcggtagtaattgagccattaaacaattcgatagtactataactatgatacattacaaatgctagtgaagaagtttgacttttactagaagcaatttgttagcggctactatgatagttttttcattatcctttttcattttttgcatggcttattgcgctttcctgttcccctgttaatttgccatcccgtttatgatgagaaaatacatgcaagtgtgtagcagtgcaatttcccgcaattacacaaatggtcgcattaatcggatactgcaaaatggaaatttgaattgtttattgggatcgctttttgtttcaacttgtttgtttcatcagcgatgtggtgattgaacaactaaagcgtcaagcaaatgcgccatttcttcttttctttgcagcatagcgcatcccgataattccctatttcgaaatcaaaatatataatttttgtgatacaatgcgaatttccactctcatctgtgtactcgttcactctagcaatactgttttacactcatctcggcgcaaatcgcatctctatcttgtcgcctccgcgggtgaaaagcctgttacctggaggccgtagctgttacctgtgatctcgcttgttgaggtgtttgatttctttgtctgatatgacatcaaatttgggatgcgatacgtgcctggcccttaagtatgggcgtatgaggagttgaatggcgacaagcttcgacgaaattagatgaacattttctatgcattaggggttatgtttttacatggaattgtagattacaattttaattgttaaataaaagattgaatgatttatgttttgaagggccactttgcagctatcaacaagatgtgaatgctacatgttgcgaatcaacctaccgtcagccaactacattactcaccgttcactgaaaaaagaaaggatttaaggtggtttaagagcgctggaaggtgtagctgaaagctcaattcgactataaattgaggatagtcggtgaacgaggtttatcggctttactcttgcagtttggaaaatcgctatcttcagttggttgaaaaaaggagtttagttgcgcaatttcttcctaaagtttcctcttttcacactaaggttttgtcttcttattgcttttaagtgaacccagctggtttttgcaccttggggatcctgtcttctttattctcacttactcgacgtccctaactttaaacaatccccctccctccttctttccttaccctttatctcctatcgttcgactgtgtgggtaggtgcatgcattgttaacctgttgttgcttttccttctctctcgtcatctattcttttattttacttacccggttttttctgctgttactaaaaaagaaacccaaaaatttcccgttttactcccatctacattttttttgtttatttcgtttccctctctcctccctcaaaactagtgcatcgatttccattagcacgcatctgtgattgttgactatctgtgtatcttcttgctgatttattattcttaagctaagacaatcttttaattttctttaaaaatttccatcccccatttctctcctctttgtttttttaaaactttctactaatttgatcccatttactctactaatttatcttttcatcttctccattttgttaatctttacttttcagtgacggatccctgttttctctttttcaagtacgaacgtgcctcgtctacctgaattcctcctttaattttcttttttggtaaatatcccaataacaaaaaagaacactagtaattcaaatactgctattttcgtgaagagtggttcttttgattttttttgttacttttttgctcttaattacttgaattgctttttttttgtttattgtctttttcttcttgcaaggattcattttgaaacacccacttttctgtgtgtctgaggcaaataaagtgtaatccccaaaatactcaagcgatagtttctactctttaattgcattttgtactaaaattaacttgtctcaatgtctgctgcatcatccgcaattcccaaacgaagcgatcctcgtttacttgaccaaaaaaaatccgcgaaatcaacgttgcccaaaaatactccagaaaacggtgttagcactgtaaaaagtatgtttttccaaaatttgttaacttaaacttatgttatgcgcatatatatatgtatatatgtaacattttttttttatttttacataatttctaactttgatttagacttacaacatgttccttgtaagttcttccgaaatggaacttgtaccgcaggcgaaaactgcccttttagccattctctagaaacagaacgaccaatttgtaaatacttcttgaaagggaattgcaaatttggtcctaaatgtgctttatcacacgcccttcctggcaacacaaatttacctaatggaacttctacaaatactatggcctcaatggctgctaatggtggagcaagctctgttgcgtcaaaacaaatgggtgctaatcagatttccccttcgctgtcctcgaaaacgatgaaaaatccggcagataaggctaacaacacaaccgctacagatgttagaggtaatactgccacatccccctatttcccattttcgagatctcctggcaggcatagcggcaattccactattaatggtatgatgacaacgccaaactttttgtcttctggagtaaacagtcgctctgtggatgagtttaataatagctcttctggatttccctctagtttgaatggaattcccattgcttctcctccattggcaacatcaccaacgtctttcagtcttgcgtctagtgcttcgtctaccaatcttggcggaagtaaggggttgttgtttcagcagatgacgagtgagaataatagagattacttttctcgtcgtcctactctactgaatacatatggtaataggtgttcttccactgatacgttgtcttccttatctagattaacaagccaagacccattaaaagcatctctaccattacaaagcccgcctcttgctcccaaaaccggtgtttctttatcccgtcctcgacttacactcgatcaatcacttggcaacttatcacttggctcgggaataaatcaacgacgacaggtacctcgtagtaattcctatgctggcgcatttccttcagtggttagtgctagcttgcccactaaagtagatttgaatcatcaaatggacgttagtgatgaggagcagcgctttttaagtacgcctttaggaagctttgatgaaagcattttgggctcatcacctatcaatcgattaagttcaagctttaagcagtacacttcttccttgaaaagtcctggtttaagtactcggaccagctctactatgaattcgttaaacagtagtaggttcggcgcatacttctccaagtctcgttatgttgaaggttcgggttcaatgtctaccacgcccttagccactagtgtcaataactcttataagttaccttcaggttttagtgttcgtgaagaggccgtcttcagctcgccaaccactgaaggttcaagacctgtgagtcttgctcgattgaagagcgagcctatttttagaagtgatacagcatctccggaaaccatcgctggtcttggtgatacaaaaaatgatcctgtcgtgagtaccaataatagcgtatcacgtataaccgttgctaatagttctcctccgtggaatagtacggtggaagaagagacgccattccaaatggatgattaaaatgaatgccgtcgaaaaatttacaaaaagcttgaaatgttttattaaattatgcattattattgatagttatcatattttttattttctctgtgcttatcgcatgttttcaatatgtttttaaattggggttagcaacatatgaccctgcaaaacgtcttgtttaaatatgcgaaatttttttttctatttccaaacattcttaaatgaaaacactgattttctctaaattaatttttacccacagtttaaaaaaaaaaactcattgttgtggttcaagttaatatagttgatacatttactatctcaacttattttttcattatggcccattaaaaagaattactgtctatttgatgcggtttgtttccttttttttcctactgatcatttgctactgcaaatgagttaaaatgcggatccagcgtacctttacacctaataattggggaattaatgatattttatactcggtttgcttgattgtttaaaagtgtctgatgaatttagaaccaataaatatgtgtcaaaatggtgaagagatatggatagcttcaacatatggtccaaagcacgttttgaaaagtcaaaaaaagaagctcgttgcaatgcttcaaaccaaatttgaaaaatgttaatgaggcaaacgattgcatgaatgatttaataagattagacagtttaaaaagaattgcgttctttacgaaaacgtatcattgaactaaaagtgatgtatgtacaggttggttagtttacctttttacagtactatttttctactgataccatcagcaccatagaggtaaatacaaaattatggcgttgctaaagaaataaataataagggaaaccatattctcataaaaaaaaaacggcactagaattactataaacgatattggggggaaatattattagagtatcaaagatatgggcatctcaataatgacttagcaagtgaaaaagttagattttaggtatattggtcggttaggcagaggcgtccaaactttctttctttctagtctttgttgacgacgctgtaaatcgcgcaagagagctcgctcatctcttaaaacaacagtaactcgaacccgtggagatctctcaatggcacgacctccacggcccatagtgataagtttctttaaatactttgcctttccaacccatatttgatcaacgtagagagtactctcatcaagaccagcttcacgaacagcgttttctcgagcagaaaccaaagcagttgcgatgtacttggaaatttttttatctgacattttcatttgaagtaaagcatgataaaatggcttatgggcaatttgacgacacaaagcgccgactttctttaaagaggagcgaagcaccattgattgtaaggtgtaggaaggatccatggtctcctgttttttgaaagaaatacgtgaccttggtctctcttttacacgctcttccttttgctgacgattagaatcgtccttctggttagcaagcattgagaaaatgtcggaccctttttgcgaacccaaatttgcaggattttgtgcagactcccttaagtaggatccatttgaaaattctctaacaaaagaaagtaatggaaatttgtaatggtacgttttagaattcaatcctatcgtggacgatggaactaaaaagccctttgatattttcataaattgattaatgtatttcataattaaatcttaaaaattttttcccaaatattccttccacacatagaagtcaacgttttcgactaatttgagcaaatgcgctttctcaatgttgtaacaaaaccaggtaaatattacatgccaaggtggtactaataggaattgcaacctaacgaattgctaactgtactatgttataggtcagttagcatttccctccttatacagttataaaaatcttaaatgagagagctcactatcactatgcaagctactcagtttgtaaatctatttcaaggatggataaactacgataaggtaactttacaacgatgttaacacatgcttacatgctttatgctggcacactaagctgcacattgcgggtattatctgaacgcgttaaatgcatggtcacgtaaagacagaaaacggcccttggcagtaaacaaacaacccatttgtatgttagacaaataatattagagacaggtgcagagactgtacatgaattgttatttatgatatcttttagcttctttggggaggacgagattaatattacgacctagtgggcgcgtactgagatattttagtacaataaccttttgaaattttttggatattatccttttcttttttattatggaacaagtacaagatgaaatttggaagttaagtacgctggacgcctgggaaatggtgaacaaaaatacagaagttgtgtttgatgaaatccccgagccagaaactttaagtgaaatgaaaagacacccattgtatagcaacatctttaacgccgataataatactacgagtttcacagaacaaatcgagacttctgaaacctccaaaacccaagactcggaggggaacaaagttgataaaaatttaaaagaaaacaagtcaatacgtcgtaagagaagcattgacaacgattatgaattgagtaatgtaaagagaaatgatataacatcgggaaaaaatagagaattcgaaaacgaacaccatcccgcaagcgatacttcttcttggcgggaactaccatcaattccaacgttggaagaattgacgtcaaagagtgttgaattaccttcaaacaacatatacggaggatacaagtcctttgaagattacttatctatacactatcggttgctacgtgaggacgcagtttccccattacgagaaagtgtgcttcggtacaaggtaaaccccaattacattaccggctcttcgttagccgtatatgatcatgtgcggatagatggctatacaatatcttccagtgttatagctgcaaaattatccttcagtgttcgcgctaagaaaaaaataaaatgggctaccagtcgtcgtcttatcagtggatctttagttttattaagcaatgatgatttccagacttttcgcattggaactgtctgtgcgcggcccttgagtggccttaataaacatcctcatgaaatagatgtcaaatttgaagatattagtatctctttagatcctcgagaagaatatgttatgatcgaagctacttcaggctattgggaagcttacaagcatgttcttcgttcattacagaggctttctgctagcacattcccgatgaaggattacttggtacactgtaaaagtaatcaggagactgctaaacacatacaaaataatcctaggatacgcataaattctatcttaaaaaataactctcaaaaaatcgtaaatgctcttgagccgttcggtcctggcgagtatatactagactcgtcacagttaaaagcttaccagtccatgctgactaagagactctccattattcaaggccctccagggactggtaaaagctttgttactcttaaagccatagaaacattacttgagaatactcactcccatgttcttccgattttagtagcttgccaaacgaatcatgcagtcgatcaaatattgattcgtttattgcatcaaggcgcttcagtaatgcgactaggttcaagaacgaaggatcctgagattgcagcggttacgatttttcaaaaagcaaagcacaccaagcattcatttaaggctgcttataatgagattcgtcacaaaaagcaacgcttaatcaagcaaataactaatattatgcataatttcaaccttgaatttgtaactcttagctatctgcatagtaagggaattataacgacctcgcaactcgagtcccttcgtaacaacactgagtggatcagttctgttgcggaaaatggcgaaaaaactgaagaggaattaataagtatctggttaggcgatgctaaagtggagcttatcactccatcagaaattacggatggttttgaggaggaactacaaattgatccagaaaagctggaagaaattcagaaagaagcagaagacagtggtgctttaatggaagaggaattgagagggaaatttattaacttaagatgcaaatatctattttcaaagctaacaacacttcatgaaaaggagattgatacccttctcactattccaaatatttgggatataccagagtatagtagaggaatcatttactgtcgctggttagaatcggcatatgcagctgccgaaaaagaactcaatcgtctctatagattttatctgaaagtagaccgcgagcgtattggtttttcaaacaaacgcgcagccattcttttgcgtggagcgaacgtaattggaatgaccacaactggattaaataagtatcgtgatatattagaaaggataaatccaaaaatttgctttatcgaggaagcagcagatgtgttagaaggaccgattattccagctgttttcccttctttagaacaattggttcttatcggtgatcacaaacaacttagaccaggttgttcaacttatgcattacgacaagatccatttaatttatcaatatctatgtttgaacgattagttgaaaatgatatggaatatactcggttgacaatgcaaagaagtaagtaattttaaatacaatttcctactaacagaccttaggaatgcatccccagattcgaagattagtgagttctgtttacgaagatttatcggattatgaaattaccaagtattggcctagtattccgggaatgggcgaaattaggagattctttttaactcattctcgtattgaagacaatgatggctttgcttcgaaaattaatttattcgaagctcagatgttagttcaatttgcagtctatctcattaataatggcgttgaacctcaaaaaattacctgcctaacgttttatgctgctcaaaaggatctaatagagcgattgttaagtgagtctcttaatagagaaaaacattttattaaagtcgcgactgtagatgggtatcaaggggaagagaatgatgtcgttcttctttctcttgtgcgcaacaatgaccggacagaggtcggatttctttcctccccacatcgcgtttgtgtttctttatctagagctaggagtaagtgagattttatgaaaggaattattaacatattatcaggaggattgtttatatttggaaatgcgcaacttgttgcggagtcgaatcccttgtggtgggacgcaataaataccctcatgaatgatgaaacaatacaaggtctaggagatcacctacctttgtttaccaaagatggtacaatttatgtaaatggtaagaaaagcaagcagtttcagtttaattttctgactcactctgtagatcctgttgaattgcttgacgttaatatgcgattgacaaggaaataatgaggttttaatatatttatacttttacttaaatttatagggtttctacttttttttacaaacttttgtcaatagtcacatttaatatattgacaagcattagaagggatttaatgaaaataatattcacgaactgagttcgacaaatagcgcgataaagatacaacacgacaggcttttcaatagcttaaaaatatctagaatttgacacaggatgatttaagtgaacagccgaaagtataacgattatgatggacgagtttttgaggatgtcgtttttgaagaagtatgaaggaagcaaaagacagatatagcaattagggctatgactgttgcaaaaataacttgaacagacaggattgtggataaaacattcgacagtaatgtctttgtaaaattttcacttttgtctgaagaactttgcagagttgcttccgtcattgtgtcaaatggagatttgtccgggcgctttacagattcttcattttggatatagcgttcaacaagtcgggatttaatagactggtagattagtaattgacgaatcagttttttagctcttacatctttcttagtagattgaacggaggttagacatgaatcgattttggagaaagccatctcaaaaaaggactccgtggcagcgaaatgaaacttattctcctcaaaggctgatacaaatgcatccttaggggaagtaacggtacgtacttgcattgaagaaaattttggatgtaaaatgataggcaaactggaacttctgtatcaacagggttagtacgtaaacgaagataaagatacaatcacatactcatcctcgaaaacagtggaaatatcgtttgtgcttgaagcctctaattgctggtagagaacaggatccactgaggtaagtaatgtaggagaagtgatagaaacgtttacgaatgcttcaataagatgacaagcgtcctgtttcgataaaaggtgattgggatcattctccacaaattccgaagccaactttcggacttcttttttcatccaagggtttttcgtaaacagctcactataatgaatgtcaaggagagtgataagttcggaaatggaaatctgcaaccattgttagagaggaaaacaagatgcttctatagaaatgatttaacttaccttcgaatgggatatcttggagatctgtccaaacaactcttggcttttcgtcaattcattaggaacggaattcatactgcaacaagtgaaacttaataaattttcaaaaataaattttgatttgaaagcaaatagttctcgaagggattgaatttcttccggcgaaaggagtttaaagaaatttaattttagatgcaaaagaacagtgaatcagaacaaaaaaggaagttaataactcgatttcgctttaataaataaaaatattatcataaacacattaaaaattctatcaatagaccttaactatgttttttatacagaaaggagtatgccgtcagtcaagttgtaactatattatcatttccataagaaaacttcttgtttttcctattgattgaaaaatttactaattaaatagtatcgtaaacttcaagtaaaattcatcaactaagtcgtaagggactaatggttgaagatgaacgaagacaatttcataaaagttatcgaagtaacatgtgacttgagttaccaaattattgaaaagggcatgtagtagtaaatatcagaaaaaaagtaggtaaataataacaaatgtaggcgagttagaataagattcgttcttttttattattcctttttaatcaacaatttgtttttttttattgaaccgaaaatcatcgacgccgagtaagaaagagtgagattataataatccttgacatgaagaattttatagtgaaaaagtatctctgatcttaaaactttcattcattttgtcaaggtctgaaatggggcacattggtcaagtttcattttgttcaccctacgaaatacctatgcacataattcacacattgacaaggtacggaaatgccgaatattataataaatcaaattatttctagtttacccttcaaatcctaaatctcaaaaactctggtacagtttcttttaagtgatttaacttacattaaccgaagtgacatttacaattttcgtttcaaacaatatctacatataaagtactgtgttatgaagaactggccatagcaagattttgctcttgagttcagtaattctctaagttttagtataccaattccacatgcatatcgaataatgcgcatccttttatttcattttaggtactttttcatgatagtttgacatttattttttaaatctaaaaaataataataataatgtaatgcagaagctgtttcaggtatcaacataccaataaattctaggatttcaatctaagcttaatcacaaacttgcgattatattttttggtaatgctaaaccatcgtttgaaggattttttaaaccattttaattacgtgttttgatatctttgatacggtaagaaatggagcttttgtttcgtcaattgccaatctacatttttcttgtacgaaggattttataaaaaaatatgatgacaaagtttatgattaattcaagatccttgacaataaaatataaacaaattgctataattaataataaatttaggaatatatttaaaatgccataacactctgaacattttgaaattcgaattatattccttttcttttttttttttttttgaaaattgacagatctcttgggaaaaacaaattgtgatataaccaattggggttaaaagtacaataaaagaaaaagaaatattggagtaaatagtaaagaactattttcagctttatccatatatattggattctttttctctattttttgcagcgtatttcgtaaccaccaaaatctccaaactttgaaaactttaagcgtccatgcgttaatgtattgcttaatcgtactacatgaacccgtatgaaacagagatttataaagttgtccccattcctaacaaaggaatgggtatgattgcaaaagtaaaaatccccgtcggtacaagaatttttgcagaaacgcctttgataaggacaaaaagtgacgctaaggaaatcgaggaagcactgtctacaaaaacaaaagaagaacaggaagcttttcatagacttttcaacgctcatccagacactatgggaccattccttgggccattttattccaatgcgctgaccattgatgagacaaagggtggaatgtttttacttggttctcgaatgaatcacgattgtagtcctaacgtgaaacatacgtggaatcctagacttgatcaggttacggttcatgctgttcgcgacatcgaggctggcgaggaaatacttacgacatatatagacttacataaatcacatacggaaagacaaaaaatattgctcgagcattttggatttaaatgttattgtagtgtttgctctgtagaggaacgaaagattaggaaaatcagcgatttaaggagaaagcaactggcctactatgaccgaaccatggcaaaaatgtgtatagttaatccaagaggtgctctaagagcattgagacataggatacacattgcccacgaagagcttcttttcggtcggttagatataattgcacttctggatgccttccgattatgtgtcatccacggtgattttgagagagccagtatttttgcaaaaaaggggactaaagcaattagtttgtatgaaggaactgattctgaaaaatatttgaaaatttccaagtatgtagagaacccacgaagtcatgctcttgctgaaggagtgcctgctctaccattatttttagaagaggatgatgaactatcggatttggaagataatttatggggatgtaagcttgaagaagatgtttatagtgatactgattaagcatggggtaaaaaactactgtttttgtttttattggaaaattgggcatgtattgttaatgctcgtcttaacttttagtttgatgagcttgggattgtatttattctattgaaaaattataaaacttttatggatgataaaaacctgaaattgaaactatcttcctgagatcctagagtttttgtatctcctttcttttttataaataaaaaatttagaaacctattggggtttggcatgaattgtaaatgattgagaatattttaatatggagaatattcagtatttagcatagaagtgagtactgatttaattcatacaaaaggtatttataaaagaaatttataagaagggtttgcagtattgagtaatcacttcctatcgagttgtaaacattattgttgaagagatttaagcatttggtgcatgtttgctgatttttttaaaatatccaaaaaatagattcggtattttgagcaaaagccgattcacaaatagaaccagtaaatcaataaaccaaatattccttattattcaaaacaacaaaaaatttcttcagaattatacacattcttaagacactgcttttgtaacaatatataacatattctttaacctctaaataataaatgcatcagtggtgtagcggtaacatcaatgccttccaagcattagctccgggttcgactcccggctgatgcagtttaatatttgcttttttagattatctactaaaatgaatatcattctactaaaactatattggataaatgaatcatgaaacgtgtatcaaaatgttctaatacaaaactgatatgttgattctatctatttgttcatctatccttacatttaaaataacaggttatgattgtgtatctttatttagcagttgctagtaatacagatgagtatagtacacaaatatcaagccaaaatatctttccactgaccattagaattgttttaaattaaaatcatactaaaaataaaagaactgctgtatacaaacagagtaaataatgaactggcccctgaacaagtacaaaccaaaaattaaaccatgaataaatattttaagaagaaacaacgaagattaaactgaccgcatattatccaaaacaacctaagaacatgaacattgaggtcgaaaacagtaaaagacttgctaaaggaagattaaagacgaacctactacatataataaagggaaaataattcatatagatagttacgcggtgttgcgaagggtattacaactgtatccagtaatcagcaaaccaggggggagagactcgtacttgttgtattcttccacaacgtcttccaaagtagagaaaatgaacctttgatcagggcaagagacgcgctcagctatacaaaccggtaacactctaggccaaccgctttcaattagtgcttgcacaagaatttctagtcggtgtaaagccattaggaaaactgtggtctgtgtagggacaaaagaaggtattttaggcatcgaacccttttgaccagttccagtacacacaagaaattgatcggccactccacgatgtgtaacgggaataccagcagagataggggccatcaaagcactactgatgccaggaataaccgttggtacataaccgtgttgtgtaaagaatagatactcttcaccgcctcgcccataaatataaggatcaccttgcttcaaacggacaacataatcacctctagataaagcatcaaaagcaacctggtgaagttcatcttgtgccttatccgcatttccaggaaattttctagcaataaatagtggagtatgccttggaattaactgtaataccgcttctggtaccagcttgtcggctagtacataatcggctttcattatagcctttctggcagcaacagtaagtaaatcaggagagccaggtccacttccaattaaagctattgaacctcgcttatgagtaggaaaagcctcagggtcaagcgtcaatgaaggcttgtccaaggtggttgataaactttcataggagttggcaagtgaagaagattggcttgatgagagtggaagagagaagttgtcagaaactatggcaagaagatcgtcctctgtcatccgaaccaacttctcgaggggccaaaaatcactaacatgattgatccactgttttttttctggagttttagtgatcgctcgcactcggccaaaacgctcaatggcttctggcataccggaaggaaggctactcaccacgtgtctcaacagcctttgagctaaacgacaaccatttgatgaagtacttaaagaaatttgaagaggtggttctgaccacgtagctggtagagtaaaggagcacaaagaaggattatcaatgatgtttaatgggattcggtaccttttgcacgtacgatgtaaaatttccttttcatggtggttggactctgacacgaaaacagcatccaccaaaaaatctgtctcctcctttcccagcgtcgttaatgaacgaacgggatcaaattcagaaatgggaagaatttcaatagcatccgatttttttgcgtcaagctgaagatgaccaacgtcaaatccaccatcagcggagctgcgacaaaaccaaaaaattttagaagaattttcacttaaacataaattcacccgtcggtaagcattttttcctgaaccaacgactacaacaacggcgtctttcaaggaccaggaaacaatcattgtagtagtttctaataggttaactcaggtgtacttggtagagaataggtttttgcccaaaatttttttttaatctccaaatattgcgtcaatcttattttccaatatatatattttcacttcaatttttcacaattttagtcacttcgttttggattgtcttggtggagaagaagagctgctggctgaagtactgcaaaaaccagactttgttgttctacgcaaaaatgcgggaaagaaaggaaagaaatatctcataaaccaacaatttagcctttagcttaagttacaaattttaattctttctacgaagcaatcgagcaattgattgcaacactattaaactgattgattaacttgtagagaaagacaattgtgcagtggtcgttaaacctcggtaaattgaataaagattttcaacgataatgaaaacaataaataaattttgtacttccgaatatcgctttaaatcctctttacgtattacaacaacccgttatccgacctccttccttgttcttttcgcttgatgagcgtttgaggtcttgcctacactttatatgactgcatacatcaatcaccaaatgatggcgcaatttgctgcaaaaatgattgatcgttaaaatttttttgcggaatacggtaatcaaccaataaccatacttctttaaaccaggtaaagtaccagcggtagagctcataaaatatttctatcaaggcatcgttattgcacgatatagtacaaaaataaccttgctagttagtacatgacgagtcccttagtcactgtagtttttgctaattaacaagttaacttgcatgatagctttcctctagctttggggaaaatttggcttagtaagataatgagtaaaaagttttaaggaagtacgctttgatattcacaaaaaaagaaaatgctttcgaactgcgttacttaagtatgaatgcaaacatctgaatcctcatataaataacaaaccacaataaaaaaatggcccacttgtaaatgtcatacttcctcctagccaaatcagagatgttaatatatattatgtttagtgataatgttgctcacataggccttaacgttaacgaatttttgtaagcgctaaacgcatattttccgtattcataactttacattttcttcatgcatgggtgaactctctgttgacggcgagttttcttttctttttttctaaagatatttcaagaggcgaatcgactttttgagtcaagcgaacaagtgtagccttgaaaaattagaactaacttttaagcgaatagtgagttacatcgtatttttaatattccgttaaacatggtaaactaaagttcaaattgtcaacaacacaacaatatactatgctatactgtattgcgtcacacgtcactatatgttcacatgttccatttacatatcgcaccgcagatgatacgatgttgatattaattttaacaataatctattaaaatccaaatcatctaaacaacgtaaatagagttactgctaaacctcattccttacacaattataagttgtatttgcaataaataacaatacaacttgatagtacaatacctacactcagttgctacttatatcacctgcgtattgcaataataataggacgaatgagaaactcatcgcaattcaatgtattgttaaagcagataccaaactgcgtagctgatatacaaaaaatttgaggataaattagccaagggcacggtatattgtgttacatacctgctttcgacgtttttctacattttggaattgaggacagaaggtagaattcgcatatatccacagcctgtctctctgtctgttaaacatggacccagagtattctgagctgtttgaaagattaaataagcaattagataacgtggaagatgttcttaaaccattgaaggatgctgaatcaatttttgaacttgctgaaggaaaatccgaattggaacaagcaaagttatatatcaccatgtcctatgccattaattctactctctattctttttataagttaaatggaatagacgctagtgagcgacccgtaatgcaagaattgcagcgtgttaaaaattacattagcaaaatccagcaagctgaaaaaaatgtgaatcccaaaacagaagcggtaaatacgtccaacgccgctatttcctcttcttcttctaatcgtccaaaagttgctaaggacgcagctactcgaatcattaaacatcacacttgatagacgtttttgtttcttctattgacatgactttggctctatggattaacgggtgataacttacgaatgaaaaaagtaattaattttttttttaattaatatacatggaatttggagctaatggacggattttaccgaaactgtctctttagttgcctttttttttcaattttttttattattcgagcgtaatactttgaaacaaggatttatcaaatatcaaaaaggattcctttactatgtgctttaacttttttttttttttacatactttgaaattcatgtaaatgaaagcgatttttgttgaaggcactgtgttgaatggttcggtttagatgcatgcctaaattcttaacatatcctcatagaaatgcgaaaacgtagacgtggaaaaatttgttttttatttaaagtatgtttctctaattgcaaaaatgaatatggaatagaacaattattgtctttttttaatgtacaatttatatacagtttgttttttcttctttgtttttggttttttcttttttccatactggagagcttttaaacaccatgcagtggtgtaggttttgataacaagtcgaagaaaagatgtcggttcttgcttcaatcctcgttctttctctcttttgttttttagttctcctttataataaataggtgtagatggtggggattgatagattgaaattaaaagagagagaaagagacagagggagagaaagaaagagagaacaagaaaaagataaaggaatatatacaaacggactggatattggggaaagtgtttaagaattgttgtaggattgttaataaggatatccttcgattgagggcgtttgtcttatgttaacaaacgaatttacatatgttttttcgcataagctaatgagccagttactatttgttattcatgacatgataagtaaaaactttagaaaaaaaagaaaaaaaacatacaaagatccatactaaagcttgtttcgaatcaatcaatccctgtcacaaccaaacaaacaatacgagaatcacttgtaaggaaaaagcaaacaaaaaaaatttgtagtgtaaagcgcaactaggcactaaaagactatatgcaattcccactatccatacctgtcaaacaaagcaaagcgaagcgacttgacccgacgcgacgcaacgctgtgatacgagtagtttagtgggaaaagccaaggaaaatcaaagaaagcaatataggaaaaaatggccaagtaagaagatactatgtatgtgccaaactttttaaatttttggagtaattgacaaagttgattggaagaatataaaaaagaaaagaaaggtaattgagctctagacacacacacatttcataaggaatctggccaaaaaaggtaaacgttaaaactagaaatttatgaaagaggaggaaaagaggtaaagtaaagaaaagaaaagtaaagcaaagttaagttgagaagtagagagtaaaaagaaaaaaaaaaaaggaaaagaaaagaaagagatgaaatgaaaatgaaaggaatagcaaactagctagcctagctttaactaatgaaaatttctctctctttcgcctcaattcatttcttaaagacaagtataaccgccatcgacaatcaaatccaaaccagtaacaaaggaagaagcattactggcgagatagagataggtaccacgtaactcgggagtcaaaccaagacgtttaaagggaacatagggttcccattgttttaaaaattcatagccaggcatgtccgtagcgaagtatccgggagagaccgagttgatacgagcaaattcggcccattcaacggctaaagccttgcaaagttgtcgaacggcagccttggaggcacaatacgcagcgatatgttgaggagcgttgacgatagtagccgacatggaggcagttgcgatcaaatttccgaaaccttgctttttgaaaattttccccatgtaataggcaacgcgatagacggaattggtgttaatgttcataaccttttcgaattcatgaggaggagaatcgagaacggacctacggaagggcataccggcgttggcgacgacaacatgaatctccttaaagattttttgaatttcctcgacgccggcctcgacggtatcagagcgagagatgtcaattttgagggtatgaacttgaacacccgtctcctcggccagtttcttggccttttcagtgggatcggtggtgaggtaggtaatgattacattacctccggcttgagcaaaggcagtagcgatgctgaaaccgatacctttggcggcgccaaaaacgacgcagttcttgcccttgaggctaaacaaatccaacacatgggcggtagtgacattagcagggggagtcgacatgatgaatgatgggttgacaagagagaaaagaataaaaagaaaaaaaaaagaagaatataaaaaagaaatggagaacgagagagaaagagtttagagtaaaaagttgaagaataagaaaattaaaaaaattgaaaaagaaaaaaactcaaaagggagaaagttcttggattgatagacaaagaactatttaactcgaaaattgaattgaattgatttaacttgactttgatgtggatttgctcaaactttgctttttgctttgctttgcttggcttggctcgacttgacttgactcttgtttgtttgaaagaggaaatcgtcctgtattaataacaaaaatccgcatcttctcgacaccattttacctttgcgtttatcagcgacaccaactcaaaaaggctcgattcgaatatgtcatcttgctcatttcatcataccgattctaccagacctactctaaacaagcctagctcacaacattcatgataacggatggatagactggcgttgaacagttggggtaaggccacctcactatcgccaaagagggcaaaagctggtgtcgagaaagaagaacaacaacgtaacgccatttcacccattcaaattgtgggaagacggtggtgtatgtaagcgggcaaggttatgaaagcgagccccttatttgctagagctgcctttcgcaaaatgtttaactttccaattaggtggagaaaaccccgctaccccactcttattcaacgtcatgtgcatagtagagtaaaggtaaaatgattaagctttggaaaatccatgcacgcccacgagaaaagaaaaaattgcagcattcaagcacaacaacgcatgaatgcataaatgagaaagaaggttcaaaggagaaaggctaaaaagtggggtgagaagaggaaaagagaaacgaaggaataacaatgaaaaaaataaataaacaaataaataaataaaattgaaaataaaaattagtaaataaggtaaggaaggagaaataaggaaatacataaagggaggggggaataaaagaaacgaagaaagtaaaagtaaataaataaggtaaacagtaacaaagaaagcaacgaaagtaaggaagcaaggatagcaacgtgaagcatacaaggaatagcaacgagcaaggaaaacaaaacgcaacgtgaagtaaggcaaaacaaattacgacggaatttacaacaaaacaaatcgcaagggtgaagcagagcaaacaaaaacaaattacaacgcagcttacaacaaatccgctgctcaaaacaaaaacaaaaacaaatccactactgaaaacaaactgctacgctcccacaatcatcaaaatacctccacacatccctaatggaagcacacaggacttacccagcattgccttttcacaagccagccgagcacaggcagtcaagaggatggacccagtggaatgagcgagttggtaacaagggcggtgtgaacagaagaaacgagatgagtgaaatgaggatgttttctttttttttactaaagctagactaaaactagtagagtagaacatttttttgttttcattcctcctttttattaaattttttgttttcattcctcacttttatttttggttttcattcttcccttttatttttattttttagggttcatgtttccttttttccactcaagtttttatttttattttttttcccttttattttattttcttttcctttcgtctcgttttatttcccttaattcctacttggtgtaactcatcgcacaaacaccacgctaccactcatagtcatattaggtgcctttggattatttgctcgctgcaccatttttcttctccttccttttcccttttaccatgttgcccactctcgttaggtaacgctcgcatccgctatttttcaagtccttttcttattatattatgtctctacactagaaacattttcacattctagttacgatcccagttaatcaaaataaaacttttttcaaatacaatatgttatagctttgtaaacacttttccatttccttgaatacgtttcttccttgaaaaacactcctacaaaactcattattatcttgagattaataattccttataatcttaatgttacatatatactaatgcaaaatataattttaaacagtaaaaataaaaaagtcaaaaggatagaaacagactgtgaactacttgtagcatattaatgatttgtatatatattcgttctctttttcgcatgccaactttcagtctcatcacttattcattttgtttacatagtatgcaactgtctccatatcctccttcaactacctcatctctcttttctgctttttcagaaatcaatgattattcactgtacgtcgctaaacaaataacgaatccaatgctgaaagtcactattgataagaaaacagctattggcaatacaaacccgtatggtctcactattaccttttagcattgctaaaaacacactttccgttatgcatccctccaacaccttattcgttcttctttgcttgctacatggtatgggggttaattgagtcgtgcaaaaaggcttaaagaacgctatgcctattcatcatccttctttaaatgattgactttatcattcctgtatatcattagtaaatttccttgtctcatacaaacataatctctcccttctttcctctcttctctctcattctcatcttaccagaaaagtgtcttgctaccgtctccccatggatactttttgaagcgcaaattttcaaagctaaaccattcattagtcccttcctttcatttcttctctatcttcttcatacctataaccagggtccgtatcttcaacatgcttggcatgctcttgatgcttgcaatctatctcttgttagtcgttgcaaatcttcacattacacttttacgtacaaatataatacgcattggcactagccaatatcaatgctggtccaccaatgctggcaaatgttagctaccacacaaattcttcacttcctcatgttcatactaataagtcactttcttccagaattctataaacccgttagtaagataaatttctattcccacaattcacataccactgctacgctttgcatgctcctcttctgcttgaacctcttcaagccagttcacctttgcttcgttactataagctcgaaagctgagcaaacccgctctcttaggaacgctcgtcttcaatgttctggataggaagccaatgttacgattcatcatgctcattacactaacaaattcgcttttttacgatgttttcaaggagatgggagttgttgcttgtgaacattctgctcctcccgtaccttcgtaattctacccatatactgtagtaacgcaccgtgtgcattcttctacctcggtacaaatttaccttagcaatgtttagcgttcagttgcgtagcgtaccgtactactgaagtgtggcgcaaagggggaatgaagtcaaacaacgtttaactcaaccacaaccaacaacaaaaacctcatcatatctcaccaccaaaaatcgcctttccgccaaatacataaaagcgacttcaaggacaaattatttcttttttccatattaggaattggtaatttaaacacttttagtcgaattgagagccttttcgttcattgctacgtaccaaattgccctttctcaacttctgccttcccctcggatttcatctcttttttgatcgtttctcgctgtagaggaacaaaaaggaaatctttaaatcctaaccgtgcaaagttgaactttgttggtagctagcaaaagctcaaaaactactctctcaaatcaccctccaaagcttttccgcttttttttaaaaaatgcggattcgtagtgctactccttcccttatcttactggttatcgccattgtctttttcgtcttagctatatgtactcctcctcttgcaaacaatcttactttaggaaagtatggagacgttagatttggcgttttcggttactgcttaaattcaaattgcagcaagcctttagttggttacaactcggattaccttgatgaacatgcaaaggacggatttcgtacctccgttattgtgcgtcaaagagcttcctacggcttggtgattgttcccgtgtctgcctgcatctgtctcatatccaccattatgactatattcgcccacattggtgccattgcccgctctcccggcttcttcaatgtcattggaaccataacattctttaacatttttatcaccgccattgctttcgttatctgtgtcatcacttttgtcccccatattcaatggccgtcatggcttgtgctcgccaatgtcggcattcaactcatcgtcttgcttttactccttgttgcacgcagacaagccacaaggttacaggccaagcatcttcgtcgcgccacctctggcagcttgggttacaatccgtactctttgcaaaacagcagcaatatcttttctacttcttctcgcaagggagaccttcccaaattcagcgattattctgccgaaaagcctatgtacgataccatttccgaggatgatggtctcaagcgtggaggctctgtctcaaaattgaagcctacttttagcaacgatagtcgttctctgtcttcctatgccccaactgttcgtgagcccgttcccgttccgaaatctaactcgggcttccgctttccgtttatgcgcaataagcctgcagaacaggctcctgaaaatccgtttagagatcctgaaaatccctttaaagatcccgcttcagctccagctccaaatccatggtcgattaatgatgttcaagccaataacgacaagaagcccagcagattttcatggggccgctcgtaaattatcgaccaatcgagttttatctatcatttatcatctctacatgttttctaatttcactttcaaagcattttttaaccgtcccccctttacctttttcctttatttagttgatacttatatggtacatatgtgtgtgtttaatgtcactgtttctcaatagaatttatctgttttaagctagttgaatgtaagaagagttggaggggttttcttttattttttattctttcaatagggttctttttctttttttttaatatatatatatttttagacgaccttcacgtttcattatgcttattcattttgtatgtgccatccagaaatcgaattattatttacactatggtaatggcgagtattatggtgtattatgtattgtgattattaacctttacacaacagcgaaacaatcttgctatttgaaaggtaaaaatgtttcaagctatatcttcacaagtcatactagttggatgatttggtgaatgcagcgcgagatgattgtgaaacatcagatccatccaaccattctaagtgtggacatgccaataaaatagcttcagcatacatttttcttcttgttctccatgcctcagacaaagtggaactaaaggccagctctttctcctgccattgcttttgcgggtcttcttttctatgatgacctttttggttgatactttgttggtattttgaggctgcagagagctcataaatagagtcgtcaattacgggataaatgttgaaattaagaggattcatgcgcagatccagtacgtttaactgtttcaggtttgccaatatatcacataaatttcgcatctttttgattctatttcccactaagtaaagtcggtggatcatttgcaatggtttcagcgactctatgtctgatatatagttatgtgataagtccaatacacgtaaattgggcatactggtcgcaatgtatttaggtacttctttgagctgaacgtttgcaagctccagatacctcactcccagaaacatgtgcttacaatcaagagtaacgaaggtgttattcgataggtatagatttcgaatatctaaagagggttgaatgacaaaattggaggcttcaggatcttgagtcctgaacgaaaaattgactaagcgttttagtcgacggatgtcagggggacgattaaatcgattaaggtccatgtataaagttcgtaaatgaggaaattgatctacctcaagttgatgtatggcgttgttgctgatgcgtaaaattcgcaaatgaatcattggttggctagctttcaagttggttagtttgttattgtccaattgtaaaaccataaggttttgaagcgaacttatttcttcgatttcttctatttcgttatttcccaagagcaattcctcaagacgatgaagattggaattcgtaaatgacaattctttaatcctgttattgcaagcgcttaattttagcaatccatccaaatgttgaatcccatctaaactccatagatgattactgtcaactttcaactcacgaaggtgaattagagaagaaagaccagtaaggtcctctagttgattatatgatatgtccagatattgtaggtttaataggttggaaaatgaagtcaaacttgacaatcgattttcaacagcattcaggtctcttatcgtaacggggcatcctgttaagtaagcaatttcatttccttccaacgtgagctcttcaatagagggacagagttcagaaagtccaatcaaggaatccaaatgtcgtctactgatgtctaattgtataatccttttccagaaaggctcatatggttcaacatcagaaagaatttgaattatggattgacgagatactgaaaaactatattcagcatctttgtcggctttacttttcaatccagaacctgaagaaataaaaggaattggtgacccattttcatacctgccattaaacatttcatcaaagctctcattttgtaaggataaatcgtgaaaggaagataaaatttgcggagcgttttcgctattgtctcttaatgaatgcttaggaaattcggattgagcaacattttgcttacgcaaaggaaaggaatgaggttgttgcttctccaaattgtttggatcattgttcgcttgatgtctggtggatgccgctttaaacagtattgtacgctcaggatgcgaaagactagcatcttcgtcggtttcaaaatcaaagcccaagtctgaatcatgaccttttctccgccaccgattgtgtatcctgtcaaattccatggagccttgagttgtatctatgccttcaggaagatctgctggcgttataaccaccatattgggataatcagacacttttcttgagctttgagcagagtgacttcttctggttttaacactggaagtttttagcgttgatttgggagagctatttaatcgggcagtcttggaagaggattgtgaagagccaacatcaatttcccgaagtggcattttatcggtcatatatgcctggcgttgaggggaggaagatgcggatggaaaggaatcatcattatcattgaaaattgaggtaacccttttcatactttgaagactttttaaatgaagttgatcacttaaggagggaaatgcattagagctatcttcttgacttacttcaactgaaatttcatcttgttcctcctcctcacgaagtccgctgagctttcgaggaagaaaaattgtagattctcgtcccgaattaggcattcttcctcgcaatcttgccatgacttcttcaacctcttgatagagatctttggtattgaggctagcctttcgttcagttgtacgcataggtttttgtggtcttcgtggttcagggagtgaaaattgtttttccccattttcaaatgaattggactttacatcttgagttaattgattcaaatgctcacgagtaaacggatcactagctccttggaaaagtttaaggggggatgtattattgggcttcaaggagggagaagaaacaacggatgaggatgacgatgcattgctagcatggtccgtattttgcttttcgtgaaccgagttagacctggtattagattgttgacttttcaagcttccttctgagtattttttgctaaactgagaagaggagatagattctttttcgtaatcctgtgaaacgaaaggatctttagaaggagaagattgcatgttcgatacattagatagtttaccaactgaagaagaactacgcctagaagagttattactggactttttggacggattttttgttggagactttgaaggggggctttgtttgctgctttcttcaaacatattttccaaatccaaccttgcaaaaatatcacgagcaacagggttctttgcattcacctgtttccattgaggaacatccggagcatcatttcttcctttcttaaacgttccatgctctgtcgaagttcctgaactaccacgacctgtagattgagtattgtttacatttgatgtggttggtggttcactagaattgtctgacccttgttcttgtggctgcggaatccattcttcacttaaatcatgttcaagccataactgttccatgatttctgaaaagcacacataccttccatagaaaaaagaagttttgtttacgtctatgagacgcgacgggatgtcgtggtactgggactcaatcacccttttgcacaatttgacataggatattcaagcgtattcgtaatgctgcttatcatattttacgatattttccacaataagggtatagcgttattttgtttgttacgttgaattccagtaaatttatttattcagaaggaaaattatggccataagtatttgaggaaaaaatcaaagctataagtagttctaagagttgataaacttgtgcatgagagattcactttattctgttaactcggaagactcgataaaaaacaattaatagcaattgcttcggtaaccttctctgtacgatttttcttttgcctacggtttcgcatacttgacgacggagatgccatttatatcaacaagatatcatatattcttcatgactttgaaagctctttagtaagcaagtttttcacaagttggatctacgcttgcaacaatcttcgaactgatcctaaattcgcttactatatttaaaggttatggaaacgacacttttattgtcgttctacagacaacgtttctcgttatgctactctctcatcttcgcctcatgacctagactttcaatcgtttaaaactctacaagtatttataatttaaagcaatcccacctcggtaatttaagaaaatttgcaacaaaatttgacgttagcaataaggataaaatgtgttcgacgacatcccaatttaatcagcggactatataaatttgtatataaaaggtcatttccacatgtagactttttcatacgacttttgaatgtaccaaacatccatatctgataaagacttggtacgccgttaatcgttacaatacgttaaacacccctcttaagtattcaacgtactaacttacgtactctccgcaaacaacatatttaattaggaagccaatttctaaataggaaagtattgagaaataactgtgtttaataatctagaagagatccttgaataatttgtgctacaacgatgtttgacttggatgaatggatcgctacagtaaggaagtgtaaatatcttccagaacaccagttgaaacgattgtgtgagatggtaaaagttattttaatggaggagtccaatatccagcctgtgcggactcccgttactgtttgtggtgatatacatggtcagttttacgaccttttggaactgtttcgagtaggtggagaattgccaagcacaaattatatatttatgggtgattttgtggatcgaggttattttagcttagaaacttttacgttatttatgcttttgaaagcaaggtacccagataaaattacattgcttcgtggtaatcacgaaagtcgccagatcactcaagtctacgggttttatgatgagtgtcaaaccaaatatggaaatgcaaatgtttggaaatattgttgccaagtttttgattttttgactttggcagcggttatcgataacaaaattttatgcgtgcatggtggattatctccggaagttcgcacattggatcagattcgtattcttgcgcgtgctcaagaaattccccatgaaggctcattttgcgatttgatgtggtctgatccagaggatattgaatcttggactgtttcgcctcggggagctggatggttgtttggttctaaagttactaccgaatttagtcaaatcaacgacttgacattgattgctcgtgctcatcaacttgttcaagagggctacaaatatcattttgccgataaaaatcttgttaccgtttggagtgctcccaattactgctatagatgtggaaatgtggcaagtgttatgaaagtagatgaatctttggaaccggaatttcgtattttctcggctgttgccgacgaagatcgtaccgttccccctagcagaaaaagaagcgagtatttcatctaactttggtatgtgcaagtcaaatatcttgttttttatggcacacatataccccctcaaacatgtaatagtttttgttttttaaaacgtagctttttttacttccttgtccgacactttctttctctcttccagttctcaacttccatatttttatttccgtttgctttgcgcgtgaggtatattctatttttccttggcagcttgttacgcaaaacgatattataagttacatgggtttgttttttaatctttttttcctagctattttcagtcgctatagtttagattgtttcccttcaaaaaagcgacttggtgtttgcaattttatttcacctcacattgtgatgatattcccttaacctttttttcgcaatagcattgacttgcgttaccacactgttccagcaacataaagttacttagtgcccaaaaattcttaatgatcccttctccataatttttgtttccattactacgcgtccataaagccaataatcgcatgttgcagtgcttgccttgtcactcttttgtcaagaacgttatacataattcctctcgggtttgcgtcgagcttgctttaattggggtttcttggcatctagtacgatgatatgtatatcatgatttttctcagttttgtcagttaagattaagcaagcaagggtgatttttgataatcaatttcttatatataagtttagtatgcattattatatctgtacagttctttggacaaattttcttgataatatctctgccgatatatcgtttctgtttcatgcttcgcttctcttactttctacttacctttgtaaaataatgttttgcaaattgtcgcttgctttgctaaggaaagtcagtcagtaacataatttgcagttttaataagcacctgttcgatcattgcacaattttttgttcgtttgaccggatttcgtagtatttgtattttttttaaatcattcttatttacgaaaagaagaaggagtggtttgtttgtttttgaagttgataaatttgtctacgagaagaagaggagggatattcagcgtgcgaaaattgatgcctgaaagagactaattgtcttcatgtactctgattatcccaaattgtgttatacagtgcatacatggagaatatataaagctttttatgtatctttttaagatgtcttcgatacagtgatgagatgagttgaaattttttttatgacctctctgaatatggcctggtttttctttttttccgttgaggacatggcatttttcttgcgtctgaatgctggatttaaaatgatcagttttatgtgtgttatcaagtggcattgatattggatttgctggtttatttgaaaatgagagatattgcgagaattgggatctttttattcgaattcagttaaacttgtttgttgaaaaaaattggtaaaagcaaacggacaatttatatttttctaaccccaattctagggttttgttgaattgaaaagaaaattgggctttccgaaatttgcaaacgctcatcgatctatgatctttttcatttattttctattttcattttcttaaatgtctttgctatcattgaagtaaaaccgttttcagttgcatcttgttttacaagcttctttccatatccttttcacttgtgttctacaaaggttgtttattcttgtaaataatttaaaatagtttgaaacgagccattttcaatcaaactgcccggacttgtgatcgtgtttatgactgtgtgtctagtgagctaatgtttcgcatagggcttttatcgcacacaattttcatgtttaactatatataacttttacgaatccccttctacaacgttagtaatgcgctggtaaatcaaaaccatgaaattttggatattacagaacatttcccattctatttaagtgcaacactgtaaaacatgtctatgttacatgcatcaaaaacgatgcttctttcatttgatttatgaaaacatttaacgtttcattttttattatttcttcaaaattaccccctaaatactttctaaagaaaacatgctgattccaatttctaaactcattgcacctgccaatataaatagagtaagtagagtgactcagtgttaatactcaacgggtcgtattagtgaagctccttccactattcatctttccatttactgatttatctcgtattcaaccgtaatttcttttaacgatttctaagacttctgggcatttattgcactccaatgcgctgtcctctgtatcccttccggctctttccacgctcttccaggactttcgagttcgttaaataatttaacggattgttcgatttcctttttcgctctttaccaaactgcttcatcatgacgtacggtgttcgaaagattctctactgttctacccaaacgttctgtaaggtgctttacgagcgagggttagggttttgggaaacttcgagaaccgtagcctaatgtaataaatacgatgaatatcccaccctcccaacatcgtgtattcctattacttgcattaatatcaattaaggagtaataaatcattttccttataggaagttaacgaagaaagttatctattgcatcttaaataaggagtgctatattaaattatttatatcccacgttcctttttataatccccaaataaactttagtcttttttatttgttttttgtcttttcacatcaatatgagcaaatcaatcggaattgatttgggtactacctactcttgtgttggacacttttccaacaaccgtgtcgaaattatcgccaacgatcaaggtaaccgcactaccccttcttatgttgcctttaccgataccgagcgtctcattggtgacgctgctaagaaccaagtcgccatgaacccccacaacaccatctttgatgccaagcgtttgatcggccgtaaatttgatgatcctgaggttcagtctgacatgaagcactggcccttcaaggtcatctccaaggatggcaagcctgttttgcaggttgagtacaagggtgagaccaagacctttacccccgaggaaatctcatccatggttttgatgaagatgcgtgagactgctgaggcctaccttggtggtaaggtcactgacgccgtcgtcactgtccccgcctatttcaacgactctcaacgtcaagccaccaaggatgctggtcttattgccggtttgaacgttctccgtattatcaacgaacccactgccgccgctattgcctatggtttagaccgtagcaaccaaggcgaatccaatgtcctcattttcgatcttggtggtggtacttttgatgtttctcttcttaccatcgaagagggtatctttgaagttaaggccactgctggtgacactcacttgggtggtgaggactttgactcccgtcttgtaaaccactttatccaagaattcaagcgcaagaacaagaaggatatcaccggtaacgctcgtgctgtccgtcgtcttcgtaccgcttgtgagcgtgctaagcgtactctttcttcttctgctcaagctagcattgagattgactctttgttcgagggtattgacttctacacctccattactcgtgcccgttttgaggagctttgcgccgatctcttccgtaaaaccatggagcccgtcgagcgtgttctccgtgactccaaggtcgacaaggcctccgtcaacgagattgttttagtcggtggttccacccgtattccccgtgttcaaaagcttgtctctgacttcttcaacggtaaggagccttgcaagtccatcaaccctgatgaagctgttgcctatggtgctgccgtccaagctgctgtcttgactggtgacacttctgagaagactcaagatcttttgttgcttgatgttgctcccctttccatgggtatcgagactgctggtggtgtcatgactccccttatcaagcgtaacactaccatccctaccaagaagtccgagatcttttccacttactctgataaccaacccggtgtgttgattcaagtgtttgaaggtgagcgtgctcgtaccaaggactgtaacttgcttggtaagtttgagctttccggtatcccccctgcacctcgtggcgttcctcaaattgaagtcacttttgatgttgatgctaacggtattttgaatgtctctgctctcgagaagggtactggtaagactcagaagattaccatcaccaatgacaagggtcgtctttccaaggaggaaattgaccgtatggttgccgaagctgagaagtacaaggctgaggatgaggccgagtccggtcgtatccaagccaagaaccacttggagtcttatgcttactctcttcgtaactctttggatgatcctaaccttaaggacaaggttgatgcttccgacaaggagaccgttgacaaggctgtcaaagagaccattgaatggctcgacagtaacactactgctgccaaggatgagttcgaggccaagcaaaaggagcttgaaagtgttgctaaccccatcatggctaagatctaccaagctggtggtgctcccggtggcatgcctggcgccgctcctggtgctgctcctggtgctgctcctggtgctgcccctggtggtgacaatggtcctgaggttgaggaggttgattaaaatactgtgcatgaagaaaaatcttttaatgggcggttttaattgtgaaaattatgttgtgaacaatgtttttttgtaatagacatgactaacgaggttatataaatattaacaaattaatagttaataaatttgttttaaagaatcttttttctactagtatgactgtaaatatatgtaagtgttttcgtgttttcgtttgctttgttactgtggtaataagtcaaagtattaagttatttgcttcatatgtgttaaactgcttaaggaattagtttcgtgttatgaaatttaaattttgcatgtaaattgaagaatactcacatatagtttgagtgtatataggtgtatttatggtatgagttctttgatttccatttcagaattgcatccttttcataataaataatagtattgagctttacaatggtaactatttgagtacagtaaatattcatgcagatgcgtttgaaatcgacaaatgtctagaagaaatgtttcaatatatttaaaataatagaagccgagtaagatgccacctgaacaaaactttcaaagcatgaaatgaagattatatacagtttaattttattcgcatccagcagatagcgcgttatgcaacgttgctgttaaatacattacgatgcactgtgacgggttcgttatgtgctcaatgttttgtagaagtaaggaaagatacatgcgtaaaccaaccttttgacaactttagatccttttgctgatggaatccaaggaagccaaagagaaaggggtaaatacttctgactctaagggatctcagatagaaagttctatatcggatttacgtgaaaaatcacaacatttgtttggtgtcctcctagaacctcaagtgccagttattcaatatggattaaatcaattagaagagaaggctcgaaatttagagtcaaaagttttattgacgcgtgacggtgatacgaaagcgtaagttgatattagattgaacgttgtgtcgagtgacaacaagattagaaatatttcattacttaacagtatacgtttattaaattgctttggcactcttgtcttctattccttttttctgctatatatgcctgaatttgaataattattaactcaatctagtcattacttgctggctgaaagtggtatgaacgctgagcaaacacgccaaaagatttattccattcatattcattctccttgggatcaattggagcttgacaagaagtctttgtatgagcaacctcatacgaaactatacaatggacaaaatgtggttgctagcatagagaacggctatcaaagcaatgtttacgagttccaattacgactaatgaaaaataatggcatagcgtgggaaaatacaaaaacggaatttatggaagatgtcggtaaattgcttcactccaaggataattccggtttaggtacttcaatcagcatgtcgcttagaccaaatttggctaggccgttattgacagcttcatccgttaaatcacagagtgttcgttcgttacgagaagtcggttcaaacctaccaattcctacagggtccttgaccaagatagacggccttaataatcaactttctaatgacttgactagatcacagacgacgaacatttttggttttgccgaaaaagctagttcatttgcagcagctgttcacaaattaaatgaggcacggattaggaatcaagcctgccatgtttggtctttgtttgcatcggttagtcagatggtaaataccgaagttattcaacttttcgatgcatggtctttgttggcccatatgattgatgaaacccggtatggtatgggtgattttgaagctagacatttggctctggattctagctctgccgcgcttgccgtagagaaaaactgcatagaagggtctttaaagtatttagaaaaccagtttttatcattgattgatctgcacctctcggatgctggtcatattactactgtcaattctgtggagaaagtgatcgcttacagtaagcttcgattctacaaaaacgggtcatggattaagtctaccgtatcagtggtcaatgatgttcctttgtgggttgtcttgttctatctaatgaggtcagggcagttagatgctgccttgcaatttgtgaacacctattccgacgattttgaaaaacttggtagatcgttcccactttatttctactcctatgccaaaaacccttctcttccgttgccaaaacaattgcgtgatcgcttacaggctgagtatggtcaactaatgaaatatgctcctgaagatccttttaaacacgcaatatataaattattagggaactgtgaaccacatcgcgtatcccttcctgaagtttgtgtaacgtccgaggattatatgtggattcaattaatgttttgccgtgtaaatcagaacgacgtgattgattccaacggtgggcaatccacaaattctctctttaacttatatcagctagaaaagaaaattgtcgcttttggtcccaggtacttcaatccaaagaataatacaccaaccaactattttctcgctcttttaatgtgtggtgaatttgaacgggcaataagctttctgcacacaaattatccagtggaggctactcattttgctgtagcaatggcttactacggtctcttacgtactaaaaattacgaaaaaaatgaaaatatcttgatatatgaagctgacgacgttaaaattaactttccacaattgatcattgcttacctgaaacatttggagtatgttgatgcagctgtttatttagactacatagcttgcatacctttggttcccgcttatcaagcgtgtagtattaatttaacgaaaatacttctgcttcaatcgcatgagttttcaaagtttttgggggacatcaaaccggatactgagcgtacaaccggattgttagacttgtatcttcgtctcattccttttgatcatgactcattacaaaagttgtatttggaaggcgctagagaggcagacgatgatggacggtttggggactcaatcatactataccatttgctcggggattacgatacagtgattggtgttgctatcaaaaaccttagtcaaagtattgtttctcgaggtttatggtctatcgattccaaagaaagtaaaaatatgcatatttcttctaatgttgtagctagtgaagctccagatgccttggctgcaaatctgttagcaatgtacgaatccaatccaaagaaaagtgcaaaagtttcagcaaccaacaaaaaggcattaaaagttctgcttaaagttgtcaaagtacaaaaactgtatggtcaagaaaaatgggacgaagttcttcagctaattgaacatttggatcttttgccaatcaatgaagtgcaagctgaattcgaacccaatgaacaaattccaccaatttctgcacgtttacggcgtcgcgcttttgagttttccacattccaggatgaggtcttgagcgttattccatccttaatgtacatttccatgtcttccattaaagctttgtacagaacaatatctaaacttcctgtagtcaatgaggaatcaaagaagaaattacaacgtttgcaatttaaagggtctatgttggtgatgttcagtaccatgatagaatcacggttgtctccccaaattctagaataccttcaagctgagcaactgactcttctgtaacgaagcattggcttcttttcttactgcgaactgaacgtttcatatatcctcttgatagttgtgttcaattttttggtatttttgtatcttttatgacttaaaaataggaattttattcacttgccttaatgcgtctttaagcttttaattcaatcccaacatttattcatcttaatgttttcccatttttatagtcttcgaaactttatgaatacaatctagtaaacaaatataatcgggattgcatagcttgcaaggtcaagtttctgtcaaataattggttcgtttatctgctaaatgcttcaaaataattttgtaaatcatgttatgccgaatatttcataataaattcatatttacacttttcacataaatcctccactttatagcacagtgaatttagttatgagccatttattgactagctcaaaaggctttacgttttttacaaataattaattattttttttaatatgatatgattcttattgatatttcgaattccgcactcgcctaaaatatatcgaataaaatatattatttgaactaaacgaactaaaaagttgaacaactcaaatcagtgaaggagatatatcttttcgactttgttctacgatatgccaaacgattgaaaattacttgcccatagttaatatataataattagtatgtaaacaaaaggtaaatataaaaccgaacagcaataaatgggtgcaggagtatttgatataagaaaatgttgaaaatgttgaaaatttaatatagtaatgaataccaaaattaagttgaatcagtttttgtcttttcaaacgaaacaaattaaaaaattttttaaaaaaactttagcatggctatgaacgaccaaatgcttgagtgagattttaaatcacgaaacccgctacacagtcaattatggtttgcagttgccagacacgcgattaactatttatttaaccaggcttagaactacagtgagttttatttgcgatttagtaaagagtgtgtatgcgatagtaacgaacaacgatattaatcattgttatgagaattttaataatatcattcacactgaacctcattcctcagttcagttatgagttatatcggtgaccgatactaatagacttcttataacaataaatataatattgttagttaacataccgcttaccgctatgttgtaagtcgctagaaatctcgccgcagtgctatgtatcgttaaagcagataccaaattgcgtactgacattataattatactacaacgttttgcttctcaaaaacgtttaaggaaatctaagttggggtgaataaaaagggcagtgacaaaataaatgtgtcagaagcaattacattaaaatgagttttggaattctacttttcacttgctattattgaaaaaacagtttgctttgaaacgagtattattcatttatttatgttgaacagctgaaattgaactccagagcgaatattcttgattttgctgtttcgtttgtcgcaatcatagcaattaattcgcgcatgtgttttattaaataaagaatgatcttgatgaaatgaagaataattacacttctttgaaaagtcctctagatgaagaagatgaattgaagacagatcatgaaatcgatttggaaaaaggaccactcccagaatatgattcggaggaagagggcgcattacctccatattcaggtaagaattgtaaacaataagaaaggaattactcaatggaaagttgaaacttgccatcttgtcaaattgcatgctttggtcattgtttacagtcggccatgcaatgcacacaatttgatacatgctctttctttactaaagtatttcaatcatattaatttaaacagatcacgcacttgtaaataatcctcctaacacacatagagaaaacaatccttccaggtcgacagataattcttcccctttcttgataaaactgctaatatcattcacaccaatctatgtactgaatgtactcgcaatttgttatctaacgtataaggacgctttctttaaggattatggtgcagcagaatggacattatttggattttggtgtcttgtttgcactttggctttaatattcttgacttgtaagtgagacaatgggtaatcttaccttcagtcactaactcattagacttctatgaaacttgggtcaaggcagttaaagtaactgtaatttccttggcaaaatgtgtaaaggtgatttctattggccttttcaacataagaagagagatgatgattataatttggatactctggctaatcatttgttgtatactcttcgtttacatcaaatccggcgatctaatcttaaacaaggcactcatctgttctacatgcactatttcggctgttttacttttaattgtatcatctggtaagtgaagttacaatgctaaacgctgataaacagtttgtattccattttggacattcgagcgtacgttggctaagttggcaaaagtgcttttgttacaaagtggtatcgtgttggtactaaacggtacgatgtttttacgtggtaaacattttgaacggataggttgtgaaattgaagcctctgtgttatttattatgggcaatgttctttttctttgcgaaatgggttcgttaaatattgctttactttattctaaccatgccagaatgtccaggtgcactcataagaacacgaaactctatcaggaatggtatagcttttatattaggtatgtgtattcaaccaactgtatgaatgattttttacttacccgactaggagggataggaaatgcgatgatggggctagcaaatgcgattagaggtgccaacgataataatgacattcccttgggggaaatggatgttgaaagcgaagtctagttgcattattaatgttgtgcttccgaacatctctataattggaaaactttctttacgaaaatggccaacgcaaaaaagcatataagcgatagttcatattttccagctttatcgcattatatttttaacacattcttttaagtgtcactaagttgtttgtccgatgtatttacctgaaaaattttagtaaaatttgaatgacaattgaatgcagtactgcgagatgatttgataatgaaatcagaaaagttgaagttggattggatatttttaatactttttttttaaattatttttgcagtgtttcatgaaattttgcttttaatgagtcaagattaattccaactattttccttttttaataatagcatttgaatgtgtatagggtgcgggacgttagttcatcacatattaaatacactttgattgatgttccttgtgtcctaccatatcaactgtcttgtaggaaaggtccatgattttttttttaatggtcaatcaatatttttaggatgtcaacaagatatcgtatagtatcatagctatgcggaaatcgctcatttactgactaaggaatagaggtcaaaagagctggatttgcaggaacgctagtcgacaaaatagatgttaaaatcttatgatcatagtatgatgattatcagtatcatcccataacactgttctttgaagaaaagaagccaaggatgaatagtggtggttagcgatgcaaagaaatgggcgacaaagtgtcaaattctttcactttttatagccaaacaacgacaaaacgtttgtgcaaaaggaattgaaatgaaaaataaaatagaacaaaataaaataattaataaataaggctcgaatcctcaatgctatttgttttcagtctccacgaaaaaggtcgagaaggttttattttttaaatttgatactttttaaaaggatacattgatgcatcgcgtaaagagcaaatagtgtgacaatcccaacttgtttttttaagcgtttatgcttctattgtcgttgctccgctgcaaccttttttgtgatagaatactcccagtacgttaccttaccaaaatttagaaataaggaataaaggattgatacactgcattgtcttataaggagatattgtaggagcggtagggagaagaaggaaaagatgtgtggattggaaaaagggaagaaaagagtaaaggaaaatggaatgaataaataaatagaattgacgacaattttagtagtgaaagcggttagaagggaggaaaaggattagaaagaaaaagtagaaagcgtattatgaagtattattttgaagattgaagaatgcattttctaagttgcttgagtttactttattagggattgtattgcacttgcacttgggatcaggagtaggattggcattaggattagaataggatttgggattcctctttgatcaaaaataaataaaaaataaaaaattagaaaacttctagtgctctcgccagaactagaactttttcatgcaacggaacgagatgaacggagaaatgcggaaccaagatgaagcaagacaacaagtcgattaacaatgaaagaaaaaaatatcaatatagtcggaaaacaaaaagatgattgattaataaggaaagtatgagaaggaggcggtaattttgcaagcgtttcaattgcaatgatattacaaattcaaagtaataaaatgataaacatacataaacaaaaataaacataaattaaaaaataaaaaaataaaaaatcgaaaaccaaaaaaaaaaaaatttattaaaaaaaaaaaaaaaagacaagaacaaacaaacaagcagatagggaagtggaaaattacaaataaaatttaaaaaaacaggggaagaaaagtcaaatcaaggtagagatgaatgattcatcatgttagcgtttgacaaattaaagatcaaagaatttattagagatgataaacaagggcagagctgattagatgaaagaacgatggagagaaaagagagaggagagaagattaaagagagagaaaagaaaaaaaaaagaaagaaattaaaaaaaaaaaaaaaaaaaaaaaaaaaaaaaggaaaattaaatgaatatcctcttttttgcatgtctctttctcttctctctctcttccttcttttctccctccttctctctctccctgccttcctttcacatacgaatattaaactacttccatgtatccgaacgggatcgtcgcaggacactatggataggccggacgaaacaaaagaaaaggaaaaagaagaaaaacaaccgtcataacaaggatgaggagccgatcgaacgacaaaacattatcaaagcgattccagagattcctttaatagcaatttatcaactagcacaaatcatagttgcacataacatatatcaactaagcacacaacatattccatactagctagcatatcatatattatactaccacataccctaccctaccctaccctacctcctgcgaaaccaagccatatcaataatgccttttgcctttgactttgaaacgtcaaaaacaatggaaaattgaaattttttttttctgtttttttgaatgaatgaatgaataaactgttgaagtatattttcatagcatctctttttttattttttattttttttatttttcatctttctatttccatttccatttctatttctacttctacttgttttcttctttctctcctttctactgtcttttttctctctctttaatcttctctcctctctctctacttttgtctttgtcattgtcattgccttgttgctcgcccgccgaaacagctcttgtcacctttacaccacccttacatcgttacccattctaaactctgttcggttgatttcggttacagagtcgtccgattggttaaggaatttgttcttttatcgttaaatacccttatctcgttacctattgcccactaaagctttaagttaatctctttacataatcattgctcgcctttggtccaatcattgcgtcggatatagatctctgcttatctcgatcgttactttgaaccaatcattaaaaatattgctgtccaattgcgtccttgcatttttgccgttatcaaacttgataaccaccagattttagggatgcttagaatctgcgcgcatataaaaccgccgactctctcccctaccgtacggttgagacgcggataaccaacgttggcctatttcaccctgcaccttaaatctaacgatattccaaccttagagcatatcttgacgcctgacttgcagtgcatctctttaacttgaattttacgcatttcttgctcttgtgcgtgcatatttgctagctaggtagtttacaaattcaaatttctctatatttgtttttgttttattctttcattcatacttccagtctgttggattcgctggttcaatttttgttctcgttgttgatacgtgcatttacatttacatctgcttctgctttagcgtgcatttgtttattttatcgtcatcggtttttgggtggttgatacagttttcttttttttgttttgtaatagaagaaagaaaaaaatttgaaaaacaaaaataattcaaagttcaaaggaaaagaagaataatttaattccttttttttttctctttattaattttacttattttctcgaaatttgatttttcttcttttcgagtgtttttcttcttcttttctccccaatattcaaatatcgatcccctaatttcttcttggtcgttcgatatatatataatttgttgtgttttctttttatcgtttgggtccttgatttcctaggtgtttttttttttttgtctctatagaaaaattccttccatttatacataccttattagtctcgatactattttattttacttttacttttcttcttttcgccaacaaacctcttttgtttgtaatttttttaatcccctttattttgggttgtgttggtctctcttcatttcttaatagatagacaagacttcttgaatcatgtcttccactaccgatgccactcccaccccttcgggtgtcaatggcggtgattccatgaccgtcaatcttaatcaattttacaataatggtgatgttgcctggattctcacaagtaccgctttggtgtttatcatgattcccggtgtcggtttcttttactccggcttggctcgtcgtagaagtgccatttctatgctgtttttgtcaatgatgtctgtcgccattgttgcctttcagtggttcttttggggttattcgcttactttctctcacgagggtggtccatacatcggatccctcgccaatttcggtcttcgccaaacgttgggtagaccttcttccggtgcttccagtgtacccgacatcttgttttgcgtgttccaaggtatgtttgccgccattactcccgctttggctatcggtgctgccgctgatcgcggtcgcatgtttccctgtatggtcttcatgtttctctggacttccatcgtctacgacccaatcgccttttggacttggaatcctaatggttggttgaacaagttgggctcttacgatttcgctggtggctctcccgttcacatctcctccggtatggctgctttggcttattccatcgtaattggaaagcgttgtgaccatggtactaccaaatatcgcccacacaacgttccccacgtcgttcttggcaccgtatttttgtggtttggttggttcggctttaacggtggttcttccgctgctgccaacatgcgtggtgtcatggctgtcgtcgttacacatcttgctgcttctgttggtggtattgtttggtgtgttatcgattttgccaagaaccgtcactggtctgtcgtcggcttctgtgaaggtgccgtcgctggtttggtcgccattactcctggctccggtttcgttcctccatgggctgccgtcgtcattggtgctttaggcgctgtcttctgctatgctgctacttaccttaagaaaatcatccgtgtcgatgatgccttggatatctttgctgaacatggtgttggtggtatggttggcaatatccttaccgctctttttgccgctgattacattgaagctttggatggtagtggtactgcttacactggtggttggattactcaccattacattcaacttggttatcagcttgcagacactgtctcttgtgccgcatattcattcgctgtctcatgtgcactcttgtttgttatgaattacattccaggactttcacttcgtgtttcacgcgaggatgaggttctcggtttggataagattgaacttggtgaaagtgcatattattacaaagactctactgacgagcctcccccaatcactacaagtggcgttcaatacacttctccaactgttagcgattccgcatccaacgaaaaggagcaagaacacagagctcaaaatgaggctcaaaaggaagaggagtatagagctgaatctgaggctcaagctccggctatttaggttggctgtttcttcccttaatctcgcatatgctattttttaattatagtttttccctaaaattcccctttcccgtctttcctgcttccgttgtatttattttccaccgcttaaaattgatattgttttacgagaagtgagagagaattttgtctttttttcttgctcttttcaatgtgtgctcccctttgtatgatttgctcgccctcccgttttgtttttttttttacaaattatttatagttaattttgtaaactgctttttttttttggttcctttaattccgaagacgacgttcatgttagttttcgcatgtgataataagttgtattcgtttcaaaaaaatatctgcttcaagatgtcaaccgtactgtcattcattcttgttaataaaatgtgttaggaacattaagtttgcttttgaagaaaatttgtaaagtagtttggttgtgagttaacttgtcagtatagttttcttttattttatgtcctcaattaagttgtgaattatttttctgtattttctcgtttcgttcattcgtagaagttactactatctgcttacaaaataggttctgtgcttaatataaatgtctccatccagccttgcaacacaaacgtccttggaaagagttctcataaaagctgaattccagtaacaacttcaaaaaactgattgtaaaagtgcttttgctctgttgttcatggcaattaaatataatttcctttcatttaatatccacattatatattatttaactcggtctcaatgccaagaagacaacgtggccgagtggttttaaggcgttcgcctgctattctgtagcccagcggattccctttgggagcgcaggttcgaatcctgccgttgtcgacatatacttattatttatttttcgcaaatgagcctttaccagccatttacatttttttatatctatcagtagctaaaacaattcctcccgaatagtcagtcagtttggggctgtactgataaacaagttagtagtgtaaattgcaagagatcgttacaatcgctttcttttttaccaatattacagagctggtgaatatacgaaagtttaagactaaatttctaatttattataagcctattcaatcatcaacatccagcaaatttcttcaatatatctgaaaagacgactagcctattttttttcttagctgacactttccatctgcttcaatgtttttgtgaactcgcttatatttggttaacactgtaagcacgatgtacgctaaatatcacaacgtaacgttaaaggacgcgacgcgaatttaatttattcacagctagaacaaacaagacgctaagataaagattggcgaagtgtcgcttactacactggtttccagcacctttgttcgcagaattgtttaaaataaagagtgtatgatgaaaaagaatctgtggtattttgaattcaactactcctactcttctctacttatttccagagtttgagcacgtcatcagcaggcttagctaagcttaataaaaccatcttttggctttgaattcttagtgtgaaccatttactttgcttattatatattaatcgtcaatatttttttggcccaacttccatatccctctttttgcaatcgctttggatagttttcttttgtctatacgtatttcataatggatgcaagtgtaagtctccttccagaaggagaatctcttcatcgctctttatcggccagccagattcaaatgttagcatttgggggcattattggaactggtctttttttaggaattggctctagtttggcggaatcgggtcctgcttccctactgatttcattctctgtacttggtgtaagcgtttattgtaccatgctagcgcttggcgaaatgtccgtctatatgccagtggctggctctttttgtacatatgtaggccgatatgtagatgaggccctgagcttttcccttacttggaattactggctgaatgatacgattgctttagcaagccatgttttagcaactcgattggtagttgatttttggttaatacctactgagggtgatcctgtaagtgcatctctctccttgcctccttggaaagaggccgtccgaatcattacgccgatcacttcgttgtctgcaaatatcattcttaatatgcttcccgttggcggttttggcgagatcgagtactggctttccagcatcaaggtattcacggtggctgcatttattgttaatggcattttatgcaacctcggagttaacaatgagaaaaaattcattggatttcgctattggaaagatccaggagccttcaataatggtattattggtgtcataagtagtttcgtcaatgctgcttttgcctatgctggcactgagtcaatcgctctcaccgctggtgaagccaagtctccaattaccacattacccaaagcaattcgctttacagcacatcgtgttttgttgctctatataattagtgtcttggttgttggtattaatctgccttataatactcccggtctcgacggcgactctgtacgcatgtccccgttcacttttgttttcaaaaaattcggcgttcccggtgcggcgagtataatgaatttggttatattgtcatcagcattatcagcaggaaaccactctttatacgctggaactcgtctgctgtattccttggccaaatctggtcatgcgcctaaagtgttttccaaatgtaacaagcatggaattccttggctgtcagtgcttgctaccagtgcaactgcaattttgtgtctcatgtcttcacaagctggaaagacatggggctttttactaaacgtcattgccgtctccaaccagatttcatggatattcattgccgtttcaagtttacgatttcgcaaagctttacgagttcagggaaaaacccatagactgtattttcccaactggacctatcccgtaggcccttatattattatcttattaaatggcgtatttcttttcctacaaggctacaagagtctctatccttttcgtctttcgcttttcgttagttattacatggagatacccattgtgcttggattatatctaatttggaagatttataagaagaccaaattggtcagttcaagtgaagctgatttggaaacagattggaaatccttagaggacactgactctgcatgagtttttggcatttttctatctcagtcttttttttttttttttgtcttttatttttcttaccgatgtgtctataaataaacgcgcattctgataccggaagtattcaactcccttccattataatttgatgattcctttatgttctttcgaaatttttattttgctatattttcttcatgtttacttacttacagcagctggctcaatgaatgagtcgaagctatagcgcttttagtcactcattatgccttgtactctaatcctaattatcattgatacccccctttataacgcaaatcttatgtatgaatgaattgcaatgatatctgattcaaaattaatgtgctatctccttatatgcattgaaactcaacctgtttccctgctattgcactttaaaattttcatctatcgcaaaactaccctttaaaacttgttaatgtaatttaaacgtgtaaactgcaaaaaagatgaaatgatgattaaaaagtgaacactggaggaaaaggtcgtactgggagtcgaacccagatctcgagaatcaaaatctcgcgtgctaaccgctacaccatacaacctggcttggcagcaagtacttcttgatatatgtaaatatttccttgttaatttttaatttttaaatgatcgttctaacttggtttttgaaatcaagtaatcttaccgtttcaaagaattaaacctctaaactatggaaaaattttgtgttcatctttttcaagaaactacctgaaaccaacaatacaagctcttggggagcggtagagaatattgttaataaagtgcatcccttacaatcaaactcactcgttatgaagtagtgaagtagtgtgtcttggggttatgaacgatgaagagcttcatgttaagggtttgacttataatcaaattgcacttttgagtagtgtgaaacactttatttaatccctaggtggggaatgctagagcaattgtgcttgcggtgaataatttatcttttctttcgatgagatttctaaccttcttgcataaatcattgatagtttgtttacactcgcaatgctactatcatatacgaaaattattgacgatggtaaactgactacaaacatctactgtagacaacaactttggttcaatttctcataatcgtattattcatctattcattctgtcttgttataaattttttctgacaggtgggagcaatttagctctaaactttttttctcctttttttttaagctacaaaagaagaagcatttaaacattttccattttaatctttaaatgtttttaatagtttgaattgacgtctctcactcgtctgaaccattcaacttgatgcaaacaatatacgagcaacgttcctaatcctactgatgattattttagaaggttcatacaatttcacatgtgaattttgctattctgtcaatatccaattgcgattgctgctttaaagaccggtttagccgctacgatttagagagcgcatttttacccacgaggcaaattttagcacaagaggaattgggctcagaaaaatatgtctaaatgatgaattagccttttgtaacgaattattacacactttcaaaaatcagtggtatccaaattgcgttttttttcttttgcactgtctaatttcgccaggctagggagctcggtgcatctttttgctactaaagagtgttgcaacatcaaacatttaattttcttcgcttcacccaataatgctttacaccgtagtcatttcatccgttatcagcaacaaccaacttcctcattcggttaaaattgcgatgtgtaatttttcttcacttactcactgggaattgctggaaggacttgttgtcgttgaaagatgggatagataagatgaaatgaaggtgttacaatcttatactcgaaattttactctgtgtgtgtttttttttttttttttaatattttcgacatgtgtaaggaaatttacaagtcattatcaaacaattgttagtcaaaattttttttcaaacaaacgaactaacattaacatggttcagacggattcagtagaaaacattgcccttcccacaacgttttgaagtgatgtttttgaccttattttcacgttaacccttaaaaccataagcattgggttcgcctaattagggaaccaaaattggtcactctttggatgaccaattttaagcagcgaacttgatatgtttgatgggtaatgtacacataattatggctaattatactacgttagcatgccataatcagcttgagtttgcattcatctatcgacatgatctcctttgccaacacaaggggttcatggcgtgcttatctaactttttacttatattaaacgaatgctgctgcacttccattatatatttgttaaggagaataccaatttcatctgctaggtcgttgtttcatacttgaaaaacattatcgtcccttgagctttttatttacttctcgattgaagttgaaaaaaaatttttttttttttttttggtctgtgaaataaatcagtttcatttttttttattgagaattatttgattttcttattttatacatttcaattcgtttgctgaaatgaccgagtctatcatctcatctcgtactgcatcgatttcctcgaaagagggttacgaaataagacagggctccaccgactcgagttctcttgatttggagaaaaaggaaaatgccgttgatactacaattgctaaaccctttgactctgatgaggatatcgccgacgtggaaaaagctggtgggaaaaaaataaacaattctttgatcgatgaaacttttgcttttatgcaagatgccaagaagttggatcccttgacccctaaacaagagagtaaacttaagtggaaactgtacatttatttgttgctaatgttgggttttttggatatgatgcttttcattggtaaggcgacacttagctattcaactattctgggtctttttgatgatgtacacatcacctccaatcaatacaataatttgaatactctgttttatgtcggctatatcgtaggtcaatttcccggtcactacatcatgcaaacttttcctcttggaaaatttgtcggccttgtcaccttttcttggagtgtaatcgtttttttgcattgttgcgcctataattacggaggtcttattgcccttcgatttttccttggctttactgagtcttgcttactaccagctatggaggctactatgggcatgttttttactcatcaagaacaggcatttctgcagcctgtattttggatctcatgtctaagctgcggtattcctgctggttttattgcctatggccttgagtttgtcacgaaaagcattgcaccctggaagctctttatgatcattaccggtggtattacattcttcttaagtattttccttttcttctactatccagacaatccatcaaaggccagatttttaactgacgaggaaaaattgtataccattgatcgtgtacgcaagtccactaggggtggaattgaaaacaagattttcaagaagcaccaatttatagaagcgctgaaagatccaattacttggctatttacttttgccgccttcacactcatgctctctaacaacttggcttatcaacaaaatcttatttttacaagtttaaacgtctcagacctcaattctactttagttggcgttgctcttgctggatataatactgtgagcgctattattgctacttttgccatgtatcttattccaaatcaaagtgcataccatgctatgttttggatgctgcccagtattactggaggtattgctttcgtagccctgccttggtccaacagaattggagagttggctactatgattattgcatccgattttggtatcacatacatcattgctttaggatggaccactgctacatccactggctatacgaaaaaactgactcgtggtttgatgtttatggttggatatgccattgccaacatcatttcacctcagctatggcaaagccgtgatgcacctagatattatccggcgtggattgtgcaaatcgtagttgcatggtttgtcacacccataatttacctggtagcacgagtgattttggcaagacgcaataagcagagaaaggaattgaaagataagaaaattgcggaaggcagtctggaaaccatagaaaagacttatgttgacacagtggatgaattcggcaatcccgtcaaagtactgattgataattctatgttggatttaactgacatggaaaacttaaactttgtttatcctctttaaaggaaaaagagaaatgaatactgtatttttagttgtcatttttgttttattctttattacgttggaacgattattttacgagctctcgttttttcccatctcaagcgcgatgcgattatttaggatgcatacactctttttttgttatttttaatagatagttgatctgaaatagacatttaataaaacatttaaagggtacaaatactgatgattttttatcttaattctactttcgcacacgcaatttggtagtttcgcttgccgttttattaaaggaatattgtatgataagactagaaaacatagcttgaagattcacaaaaagttattttataagttgtctgttagtcgaatggatcaaaagttgtttattataaactggactaaaattatagaataatagaaacagtaacaaaaacaatatattttttgtaaaactatgcactaacacttactgaaaagaaattgatgaaaactattgacattttgcaattaataaaaaaaatcattagaagctaagctatacataatactaaaaggaaaatgaaaaagaattaaagaaataaaaattgcatattaacaagaaaggggaggggggacgaaagttgagctcaataggactttacatggcagcaatgtcttcttcagaaggcccggcaggaggatgagaggcagcaaggttgcattggtggaaaatacgagtctgatcatctctgtaagcaccagtgatacaatgagtaacaccgcggttatggaaaataacaaagtcaccatttttccaatcgtgacaataaacacgttcagggttgatgccagggcgttgataattatacaagatttcacgaactttaggaagatcatcgatcacagtggtggtgccatcttcgttgtcgattaggattttctcagcacagcatccgtgagtctgcaaggcaagctttccggttacaggatttttccaaagaagagggaatgttttaaccctgctctcctcccaaggaggtaattcagacttgtcaagctcaagtccctcagaatacatacccaaaccattgggaagggctctagctttattgattgtaacgtaggcatgagggaaatattgaacgcgagtacgagcagccaccttcttttcctcgtcagtgagcaattcgtacatgcgatagcctgaggcgaaagctgtcgaacctaatggaacaggcatctcatggccagacttatcatcatatcgaagagtttgggtgccttgtggagcattaacggcgagaagggtagtgactacaggagggttatagtcataaagggcagcatcgatatgccaacgataaaaacgggtgacttgtttttctttttcttcctcctcagaaatgggatcacgatggaaagttcgatgatgaggatgtttaagtcggacctcttcaagaccgtaatgatccttcacaacaccatgaccaatgagttgtacttgaggaacaccgggaagggtgtgcaaatcgggatgtaagatgctgttgttttgctgatttgtacgattgccgtgaccataggtagaagactcgggatcaaagcgatgggtgatagcgtactgagtctctgggggtaaattgtgttgattggggaaacaaaccacttgatgttcgaaaagagccttacggatatcttcgaattgttcatccgagaggttattcaagtcaacattttcgatcaaagcaccaaatccaacatcagtattgtgttccggcaatggaacaggggaaacacgaagaccttgagaagtggtataagcagtaaatggtggctcggtagcaccagtcaaagtggtggtaggaggttccacaaccgtagtagtagcagtggcagacatgattgaacgaagaatttaaagaaaagttggtaagaaacaagatgggttctcttacgaaacgagtaataaaggaggattgaaaaaaaaatatgagaaaaaaggtattcttgataaccttaaaaacgtttaaactagtagagttcaactttggacaagtagaggagcaaaagtcgaaaattcacaacaatcgtttcgtttattgataacaatggcgtagagtggttttcgaatgtttgtttcttttcgaaaatctataacaatggattatagcaacacacgatgggtattggctgttcaaaacgaaattaaactaagatttgaaaggaaatttacacaagtcaataatgcacaatgctatcggagcaagtaaacaagctgggacagcgagaaaagttacgaatatttagttgtttttacggagagtagcagtaattgaagactttacgtagatgttgtatcacccaggtattattatgaacttcaattcaaatcaattgtagcagaagcacaagacgaacaatggtcagtgtgattctcttcagtgagtttttcttttgatttgatgagacaacatggtattcacatcaaccttttataccatggaacctccaatcctcattactcctgggccatgtaattttgctcattatcacttctaccgcatacctctctatcaacatagataagattgctgaaattacattgagtaggaaatgtacgctaagtgagtttgccgatgctctaaattcgagtgagcggcatggcaaaaacaagcatttgccaaccttcggtatatcggactgagcaccactgagtaagactgagctgctacgaaacggagaatacatgttgttaaacaattctaatgaaatgtaaagaaaccatcgatttggcgtctgcacatcaagtcttgtttggtaaaggtcattggaagaagtaggcatcgatagggggaatacccaagtcgcacccgtccgtctaggtgatgacttaaattgaggtttgaggggaattcattaagacaatcggcggaaatttcttgaccagaagactaagcaccgatgttctggagtgcgatttttagtgggacagggtgcgagttggaacgggcttcggactcgagtttgcaagtgtagaacgagtgggaaagaatcggtaaaagagtaaagtgggagatagtgcatatagaagatttaacgttttgcaggtaaatgagaatatttcaattacataatcctaacagcgctagtagtaagtctggtggttagtggtgcttgtgctttgcttgaccaacattccaaaggcagctcaagtatagcatagcaatccaacattgtcctacaaacttttcaatcacctatactatcagtaccatcgttgctgctactcactgacgctgtttactagtcatcagtctcatctcctcttcgggtccgactgtgttcattatcagagtgcacattgaacaacttggaaacggagtttccaagtttactcaaacaaccccttacacttgatttgcgtcttatcaattctgtagacaatttcaattgcagtctacagcagcttgaaacagcatttttagtcatcaaccttgaaatagattgtctagtcgagtctagtctactaagagtaaataagcaaaaaccaaacaaacgatcaaatctattttagtcattacttgttaaaaatatttttcgtttttcaagccattttgttggaaactcgattttctacactttataataaattgtgacactggtttttcaattttagtttttgacaaacagtttagaaaaaaggtttattttccaataaactgtattattttttgtgtctctgtaaattcagcttcaacattctcttttactttttttttttctactatttcccctttgcttgctctttttcttactattttctcttcgctttctcttctctaccttctttctcttcgtctcttacctttctattttctctcatcatgcctaccattctcgtcatcaatccaaactcttccaccttcatcacaacatccatggaagaaaaactcgttcccctagtgccttcagatgtaaagttgcgctttctaacttgtcctcaacccggtgctgctgtcatcgactccatcacagaggcaaccttgacagctgctctagtcttccaagccctaactcctagtgtcttggatggtgtcgatgctatagctgttgcctgttattcccccactcctctagtcgacatgattcgtgagtcatttgctttaccctgcatgggcattgtgcaagcgtctgtcctcagtgccttatcggttggtcagcgcatcggcatccttacaagtacatatcgttccgaatgtttgctttacgaattactcgattcttttggtgtttcgcgcactcgagtggccgccattgcttctacaggtcgcacagttttgcaactttcgcaaatgccttcacaagagcgtgaaacccttcttgtccaaaaggcccaagaactggcaaacacaaagggtgcagatgtcatttgtttaggtggtgctgctttagcagctattcgtgatcagattcaggttgccgtaggtcccaatattcccatcattgatggtgtacatgcggctgttgagttacttgctggcctagctcgtcaaaatcttcatacatcaaagtttggcatctatacgtatccataaagagatgtccatatgtttttagatctagcaaaccagtttgatgctgctatatcacatacacacacataataatgtgtacgacaaaggttgatattcctggatacgtatacattttctcttgatttatatcaataattacatacctatctataacgtgataattacaaccattacctcttgatacattcttttctgtcattgtttacaaagcgtattgacacattggtttcataagaataacttttcactgtatgcccagtgtgttggatacaagcagatttacaaacatccttttaaaaaatcattttgggaagcagtcaatctcgtttatactgttgtatttctttacattcgcctttttccagtcttcttcagtttagaaacattggaaggctgtgaatgagctatatggtacgaggcaaagtaaaatattattttactaataataaaaaataaaatgcgactacaattaaaatttctattttatgtatctctatccatttatattgacttgaatgaactgaaaacctattcttctttatatctcgaaaattctcgttatgtcagcaatactacactacgctatgctacactacgttgcgtatcactatatgtcatatgttggaatactagctaagatccgtttattgataatcacgggtaactatccttctatatacatagatacccgttgatacaagtatttagaaatattataaatagcgttacaactgaacctcgttcctcagttcagttatgagctatattagtgataggtaacattataacccagttaatacaatacctatactcagttgctacttatacaacctgtgtattgtaatataatagaccacaaggaaaactcaccgcagttctacgtatccttaaatcagataccaaactgcgtagcttacatgttatcgcaacgagcgtaactcgtttaactccctttgggcctgataaggaagatgcgggtgaagggagtgaaatccacggactaaccttcttttaaccaccgaagtctaccccagataatctgaggtagcaagtcacttggtatgtcagtgcgtgtcggtgcgttacaaaacgatagacgcaaagcaaaacaatgagaggatttaatttttttaggttccattttcttggtataaactaaaacataggttgcctttttcttttgttttgaattgtcgtcatgttgtcaaaaggcataataatacaaacgagttcaataaaacacaatgtaatcactcaaatcattataaccagttcatccatatacttaaagttgacttcaaataactttatacagtatttataattataaatagttatataacttacgagcagcatcccacacatttgtagctttaaacaaatgtatacgatgcattaaaaaagtcgtttctgaaaatatcattaattaatgagaaaaataagcacattagcagacgtcccaattaaataatttccttttagcagatccgcactctgctaatttacgcaatccacccttgcctcacgagacattacgatggtatagtatgatacacacacagttactacctcaaactttgagaatataggcaaaaaaggagattcataaactaatctaaaaagatacgagacaaatcgtgtttgactctcgttgactacacttgctcagaaaattgatctagtgcttggaaaagtacttctcggggtttttggtgtcaatggtatcggaacccttgtgccagttggcagggcaaacctcaccgtgctcctcaacgaattggaaggcatcgagaagacggagagcctcgtcgacagaacggccaacggggagatcattgatggtgatttgacgcaaaacacccttggggtcgatcaagaaaagaccacggaaagcaacaccggcatcctcgatcaagacaccatagtcacgggaaaccttatggctagggtcggccaaaaggggaatgttaatgccaccaaggccaccttccttacgaggagtgttgatgaaggcaaggtgagagtactcggaatcggtggaggtcaagatgacttgagcattacgttcagcaaacttggaggcggcctcagagaaagcaacaatctcagtgggacaaacaaaggtaaagtcaaggggatagaagcccaagaagacccatttacccttgtaatcggccaacttgatttcctcgaaagcaccgttaacaacggcagtacccttgaagtcgggagcaggtttaccgatttgcaaactcatgattatagattaatgatatggaatttaggtaggtttggaacaagttaagacagttgctgagcccaaagagaatcgtactatttggatgttgtatcgaaagacactggagaaaagaagcggtgagggcatgtccctttatataggacaggatctgcagccccagctgacataccaagcttgcgactagacgagacgccgatcattccataacgttctagattacataaagcgcacatccacccaatcgatgagatatgcatgaagtaagcaagtgagcttagtcaataattaggcgataatgcaaatcgcttgttaacgataaattccgttctggacttgtgcttacactatcaatatatacagaaaatgaaggaacaccggtggacctattgacgaaaaggaacgagctataataaataaaataaggaaatatgttgcggtgtgtagaattaaaaaaactattactgcacttgtagaggagagacggtgtgaatcttcatagtcgaaaaggagagtcttagaaagaaggatcatctttttctaaagaagcttacaaaaagatttacgacgaaaacaaaaggtaatgtactgacattttgctccacggtcctccggcttagtattatacctcgaagtggccacctttttgttgtagtggacaaagatggttatattactatataaggatttacgaaataataagtaattcaggtttcatccaatctttctcatcgtgtttgtttccacgtttcctgctgtttttttcttgccagtcttgtttataaaattgactcttctgaggaaaacggcttgaaccctacactgctttgcctctcttcaaattacatttacgcctccttattagcttcttttgttctcgacatttcttgaaaacgttgcaatggttcatgtaaaagtcatttgcaatttccatagtgttctatgcatcgtctgtcctccacttttggtacgtgggtcctcaattctgttttaacgtaattgaacacgatcactatattatccatcacttaatcttgctactatttatctactgactttcccctttaccacgcagcgccatcgactaaacatatttgtgttttttattatctccttcatatttcagtaaattacaggttttttctttttatctcaatttattgcttacaaaaaaaccttaattctattatatataaggcatttccttcgcaactatccatttgctattcgtgttttaaggtatcttcttttgtttttcaatcatgcctgcaaattaccaatctgtgcctcaggatgatccttcagtgccaaatttggctcaggctcctcccgcctattccgaatataatgaatctgctaccgaaaatcccgctgttgatcaatttaaaaatactacgcccgttgctgaatgcgccaaaagcattcgcatggcctttttaagaaaggtttatgccattctcactgctcagctttttgtcacttctttatttggtggcattttctacctacatcctgctttttctttttgggttcaaatgcacccatggttcttgattctcaacttcttcatctctctggttgttttgtttggtctaattatgaagccgtattcctatccgcgtaattacatttttcttttccttttcactgcacttgaaggattgactctgggtaccgccatcacattcttcagcgctcgtattattcttgaagctgtcttcattacacttggagtgtttgtcgcattaacggcttttacattccagtcaaaatgggacttcagccgacttggaggatttctatacgtttctttatggtcccttatcctcacccctttaatatttttctttgtaccatctacgccatttatagacatggcttttgctggtttcggaacacttgtattttgtggttacatcttgtttgatacatacaacatccttcaccgttactcaccggaggagtttattatgtcgagtttaatgctttatcttgatttcatcaatttatttattcgtattttgcagattcttggaatgctccaaaataatgacaataactaaactaattcccactgggcagcatgtacatgtttaagtccttgtcaactttttgattgctgcactttgtcatcgttacgatgctttttttttttaaaaaatgcggttcttttttctcttcacctaggtctaaaagtgacaggggattaattcccggcatggccgttgcatactgtgtatattgttgaaccatgtatgtgctaattataatgtttgctatgaattttattattttttattatttgttatattgttaatgatctcgatctgctcatttttactacccaaacgagcgtatcgatgaattcaaacgacattcctttttttagcagcatgaatggaaacgctgtatttaatttcgttttcaatccttttttgttgcaaaaggtaaattccaacaacggtgaccgttaaaactaaatggttgttgtgaatgttatttcatgtgggtcttcatgctatctgttaaaaaatgttgagagtgtttgtttgaatataaggtttctatatttgaatttaatactattagatctgaagagatcttaagtagatacttgtaaacgttattgaggttaagtgggagttatttactgacacgggcaactgtaagatgtaagcgattgatgattgttttatttggaccataaactttcagttgttaaatgttttgatttttttgctaataatctttcaatagaaaaagctgtttttgtagctattacataaatgtgtatagtatatatagcgtatgttactgtgagcattataatttattacatctacgctgttcttcactatatgagattgtcatttcagttatatacgcactgagtttaccaactaccgtcgtcaggtaaataatccattgttgatggaaaagcggaatgagactggtaataatcgattaaaaaggtctaataacagagggaaatcgaagaaggattggaaagacgcctctgtggaaacaacgccgcgagaaacttcagtcgacgaagataatactagtgttttcgaggatgtggaagcacaggacagtcgacaaaaacggttctcttctacgttagaaggaaacaggttcgaagaattgagaagtcttcgtgagaaggaacgtgaagtagcaatccaaaatggcttaatcgatgatcctacgaaaccaagacaactagatgaggccgtaacgtttgttggtacttgccccgatatgtgtcctgaatatgaacgtgaacaaagagaatatcaaaataatttggaacggtgggagattaatccagaaacgggtcgtgtcgataagaatcttgctgtaaaggcttttcatcgtcctgcggccggtaatgagcaagcgttaccctcagatgttcgaccacctccagttttaaaggtttgattttttttttcttactaatcctcttgattcgcaaatttatttatatatgtatttccaaaaagcttttcaaaggttcttactagatttgagttcgatatgaattctagcctccagcttaaattctacctttctatatttatataattcattttgcgattctaggatgttatctattttttctttctcagttgcatttttattcacacatgacttagaaatcgctcgattatttggttgataaaatagtctgtggtcctgatccacttgagaatacacatttctttgtacgtgaccgtactcgatctattcgacaggattttacacttcagaattgtcgtgatttggatgcagttgcttgtcacgaacgtatagcccgatatcatatattatgtattcatcaactgtgtgagaagaaacaatttagcgctcaacaagaagttgaacagttacgaaaaggtagtaaacttaaaatgctgattttgtgggacttgaattttttatgagcattttagttagcagcactctttcttttcatatattttatcatactaaccttttagtattgcaatctttatgtgaattttatgatgatttaagaaaagttaaaattcgatgtccaaatgaaccagaattccgaagttatgcaattataacgcatttacgtgatccggatgttgtcagacaatcccaaatcctaccaatagaaatatttgacgatcaaagagtgcagctagctcttcgattgtcagcgctggcgcaaaaaaataatgagcgggttggtcatatccttccgcgaaacaccgaagcatgtcctaatctttacactcggtttttcaaattggttcaatctcctgccgtaacatatttaatggcttgtcttttagaatctcacttcatgtctattcgaaaaggtgctctaaaagccatgcgtaaggcatttatgtcagcccatgccaatttcccctgtggggatttgaagcgtatactacattttgatactgtagagcaagccgcttcgttttctcggtactacggactagaagtctctgatgataatggcgagctcagtataaatctgaataaaacagcattctttaatggtatgtgatttataaattacaggactaactcataagattccaaacctgattttcgacagttgttttcacaaacacttgtcgagtccaaacttcaaaatcgctcatttgctgatattataaacggttctcgttacaatatagaccgggtttctccgaacacagctttttcaactaatattcctttatcattgccattcgctaataaagagccacaacctattgctggttttaaaaaaaatacacctgagacttcggtagtatcaaagaaccttagtacttttaatgggaaatttaacgtaaatgctcctgtttttactcctcgatcttttcctactaaacctttttctgctactgacatttcgtcagtccaacccacaaacctaccaaatggatccactaacggtacggaaacatttattcctcctgttcaaaattcaatcacctcaaataaggaagctgtgaaacctattaaaaataagccaaaacctatttccttcgagtctttatctgctgtaggtaatttaatcatatctgattccctctctcgaatagttcgtcaaattttgcaaaacttatacactgaatgggttcatgaaaaaaccaatttagtttttgcaactatgttccgtactattttccgagaagttttgcttgatggtattgcttctgaggtatatctaaaatctctgaaaaagcatgctatatcacagatctccgttagagctcatcattcgtgggtaaaaaaacaagaaaaaatgatgttggagatgcgtgagaaaaatcgtcaagaaaagtacttttctgttttgaattctgtagtcaaggctgaaagttcaaatataacaaggctgcctataaagagaacgttttatggggataccaggaatcttgataaagcttcggaaaaattgcgcgctgaacacgatcgaactcgcagattgtggaaaccagtattaatggattcacttttttctaatttacaaaaatttcctgtatatgaagattggcatttattgatttttaatgcttccacaagttcaatgatgaaaacatggctgtgtgccaagttcagcttgaaagaaactaacaaaacatcattttggcattcttcgtataatttattcaatcggcaatatcatgttgatatgccggataatgtatcagatttaccccaaactaggctatgttatggtgcttgcgtttataatgttggtttacttgatgaagagaaaagaaaagatttagctaattcagacttgaattcgtctccgaaactcattcaaggcaatgatagtcgaagtgcgcatgaatcctcggcaaataaactattttcttttgtgcatgatatttcgaggttaacaattacgaagctaccacttttgttaattttttggtccgacagtaatttggatatgcagggaatcacacaaaaataccgctttttggaactgattacttccacctggtcagcaatttcaagcattcatgttttaacaataacaaatgatcgagacatggatttggagcacagtttgaaggtattattagacaatgttacggttgaaaaatcaccctttgcccaactggaggaattggaagtagtgcgcaagaaaagagaggcagaaattgaggcaagttctaaaacggttaagagactcgctagcaacaataaatttctaacggattccaatgttgaaggtttattagaggccccgacgagtcttgaaaactcgttagtggaagacgataaatgggcatcgctacgacaaaaaataaaagcagctagagatctcttgaaaaaggttgaaactttttattaatcctttttacgattacaggttttttttattattttggccatattaatgtataatagttattaaaatttttgggacattagataattatgatcttgttcgacatataagtatgtgtacaatcgtatatatcgctttttaaaataacctctttgtactaaaaacaaagaagataaaagacggtttttagaggtcgatcatacagttatagaaacaatttcccatatcaaagagagtcaagtacaaaagtacgtttaccagctctcagcacaaataatgaattatcgggaaatttgtaattggagtcaaggataggcttatggcctaaagagactgctcctgagagaatatgctcagtagcttcttttcgcgaggtgtatatttgtaatgtgcgaaggagacgagaaaaaggctgatctttaattgaagaatcaattgtgcgataaaatttgcaatctttaaagagagcgcgtatttcgggtaaagaaggaaaagaatctccttgttgtggagcctctgaatagaacccgaaaggtgcctgatgggctccatgaagcaatttcgtctgaatctgagcaagttctaaagctttttttccgtggaccatacgtaccacattgctagcaagatatttgtgaacgatcctttgagaaggatctttctcgtgttcagccttaatttgttccaattgctccaagggaagcaaagtgagcatatcaaggcatttacaagctaaatcatcaggagcggatatgaaatactaaaaggatttgttagacgcgcatttcaatacagataatctgaacatacttgataaagtgagtaggaatccgttagcttcggatcaagccagatggcatttccagcagattttccaagcttttgtccactagatgaagtgagaagtggggttgttagggcataaacattggcattagggtgagttcgtcgaacaagatccgttcccgctgtgatgttgccccactgatcgcttccacctatttgtaagtttacggaatgattttcgtacaaatatgagtaatcataagcctgaagcaactgatacgtgagttcagcaaacgatagaccagaaggactttgaagacgagtagtaacactgtcacgagctagcatctgagatacccgaacatgaggaccgacagagcttaaaaatttgagcaactttaaattttcgtaccagctggaattacgcacaattgaccactgactggaagatggcatctgtgaaaaagggtaattacagtcctgcgcgtaggatagtatactgcttgaaaggtctttaagttggttatgaatggaattgctatttgctgtacgtgtggtttctgccatctgcttacggctcgtacttcgacctgaaggatctcccaattgcgctgttgcatcgcctataactgtaaaaacagggaatccatttaaaaagaaatgaaccaaaggcataagagctaccaagtttcccacgtggagtgaggcagcagtcggatcggctcccaaatatacactgtttacattgcacgaaggttgtaatcttaacaaagttcagttaatttggaatcatatgaaaatataatcttacaaagtggtgttatgaattaaagagcgagcttgcaattgctttaggcatgctagtaaacgtgacatataattttttttaccagggcgtagactttacctacaattgtgcaaccagcaaaatccaatttgcaccgggagcttgtattataagaaccggtgggttcctcgttaagaccgcggccacaaaggtaacacctgatcacgaagtaacatggttgtcgacctaatgctacatccatcttgcttactaccagcaactagccaagatcatgaatttgactctatacgcagtaaatgcgtttctgatattagacagtagtggaaaaaggatttttacaaagtactatgcaccgccgcatttgaaagaaggtgagggaggcgtgtttaactctgtgaaggaagaaaaaacattcgaaaaaggtctatttgagaagacatggaagacgcagaatgatattttaacatatgatggaaagctcgtagtgatgttgaccgtaatggatgttattttttacatagtcggtggaatggaagaaaatgaggtgatgctttatgagtgtttacggtcgattcgagatgctcttgaattactgtttaaatatgttccagataaacgcactctattagagaactatgatcaattggttattgttgtcgatgaaactatcgatgatggtgttatcctggagactgaaccagctttaatcgcagcccgtgttactaagggaccggtttctgaagcccaggccattgtctccgactttaaggaaatgggcttcatgaatagtttccaaaaagctcgtgaaaagatcacggagagaattttgaaaggaacattttaatggtcattcatccttgtatctctttttagagtaatagataagcaaatacatcactttagtaggcaaattatcgtcgactactataaatttgcaatttaccaactttttttttcgcaccgatttggggatctggcttacttaatttactgtactacaacgaaaagttctttttccaaatatggtggctctcttggttaattctgtttcccaattttcttcctttttcacttcttctagttgcatatctagtcgctcttttcccgtccgtaaacacatttctttattgacttgttatcctcaattctcttcttgccggtttcaacttggaatgcataatgaattattattttctcttttatcctgcaatacttgtagccgttgggaatttttcgtcaatcgtttactatcgttgtaaagaatgtaaaaaattgcaaagaattagatgtatattaaggcattcgttatttattaatcaatttgtgtgtagatgtaaagttaaatttaaaatctcttttattgacccaaagaaattcgaactcaaaatatcaaaattactataaccaattgatgcaccggttaatgccagatatttgaaagccaatatttgaacaagatatatgctttacaacatgtacaatctactaatgttgtgcaacttacttacagtgactatgaaaaattgactgataccaatatacacgttactgaacaaaagataaactagctttgagttaacttttttattttattaaagctggaaggctttacaacaatgtacaattgaaaagaaaaagtactttgcttttcagcgtcttagtacttcttctcagtttgcatcaaaatgtcagcatactcctcaataggggtttgaccaaaaggacgctcagcccacaagttaggggtgaggataccgtaggtaagagaagcagcggcaaaggcagccttaacaaagttacccaaagtcttggtggaaccacgagattgggtgtagcaatcttcgataccagcgagttgaaggaaacgcttggtaacgggagcagcaacaagaccagcaccacggggagcagggacgagacgaacagtaacggaaccgcacttgccagaaaccttgacggggacagtgtgaggatcacccaaagcagtaccccagtaaccacgacgaataggcatgatggaaagcttgcccatgatgatagcaccacgaatagcagtagcaacttccttagcgcacttgatacctaaaccaacgtgaccatcgctgtcaccaataacaacgaaagccttgaaacgggtacgttgaccggcacgagtttgcttttggacgggaacgaccttcataacttcgtcgttcaaacgaggcaagaagtagtcgacaatttggtactccttgatggggagagagtacaagtagatctcttcaatagacttgatcttaccagccttcaccagacggcccaacttggtgacgggaacccattccttctcctcatcacgcttggctccacgacggccacgtccgcgaccacgaccaccacgtccacctcttccaaatcctctgggtgcgctttctgccatttctgctaattattccaagttcctaaaattgtgtaggtaacgaaggatgataaaaaatttggatgctcaaaagcttctataatgagtgtgactgtttgggctcattagggtagggttctctctcgaatgagagttaagtaagaatgacttaaaaaatttgttttgaaaacttataaggtttttaccttattttaatgattggattctttaatggctccttgggaccaacttttgcttgtttttttttagttccctgtgaacgaattttcgttgttaccggcaatttgttacttgctcaatgttaggacttaaatccataaatttcttcgattcaattttcaactaattctctcaagcaacttccttttaattctcttattttaagttgcgatcaacatctgaacgcttcttttgaccccggtatgtacgattcgattgcctcgtctcatcaatgtaacaattagggtagggtatatgtttggaacagtcactttttattagcaacacaaaatctacttcaacaacttcttctttcactaaaccccatcgtggtcaccgctgtctacaaaatgagtcaagtcgccaaagatcaaaaggaacaacaaattccctctactgttcaccgcattcgcattacccttacttctcgtaacgttcgtaacttggagaaggtttgctctgacttggtcaaccgtgccaaggacaagcaattgcgtgttaagggtcctgttcgtcttcccaccaagatcttgaaaatcactacccgtaagactcctaacggtgaaggttccaagacctgggaaacctatgagatgcgtatccacaagcgtctcatcgacctccactctccttccgagattgtcaagcaaattacttccatccacatcgagcctggtgttgaggttgaggttaccattgcccagtaaggtgcttgttccatttggtcggggttcgggatgtcatgtttgcatcgacagtcccctccagtgaaataaaattttacttttaaaaaaaattgttgtataaaaagacgtattatgatttgtaatttgtaaagtaaggaaatatttttaaagtggtacttggaaaagaggctactggtttgttcatggatagatcggacggactacatgtgtaagccatctcctgttgcatgaggtcgatgaaggtgtaatctagctatagagatgctgttttgtagatgaatttcaacaatctttttttctcttttgatataacaactatacctctttacctgcagcagcactagtttatattcatgcccattcaagtcgacttatcgggaataatgaacttttacatgttattaatgtttctggttatgatatctaatttttttttcgacaaaagatgtaaaaccccattaaattgctgtttacttgttctacataataatcgtacaagtttccaaagtaaactttcttttcggaccttttcaaatatgtatggtaaggtgaaattggcataacgcagtctttgttcataacatgcctttcaatacgtaaaacaaaagcacgttttgacatacttgcataattttataactcgtaggaaggagacgtaagggaataaatgtgcaactcaaagcttcaatatctgtcttatcatggtaagaaagatgcaataaaacaatgggctgcgggtcataaagacatgtatcgacgaacatttatttatagaaagcaaactgttccatatctgtaggcttaacggcacgagcataagcctcttcaatgtcgctttgaaggatgacgccacgactctttcgcacagctaaaagacctgcatcttgcatgatggcagcaatttgagcaccactagatgcatctggtcgcataataaatgtatccaagtcaacctcgggagaaagcaacattttagctgtgatggtttggaaaacaagtcgacgttggcgacgatcgcggtaggaaggaaattcaatttttcgatctaaacggccaggacgaagaagagcaggatctagagtgtcggcacgattagtagccatgattactttaacattagcaccttgatcaaaaccatccatctgggttaaaagttcaatcaaaatacgttggacttcacgatcagcaccggtttgggcatcaaaacgctttgtagcaatagcatcaatttcatcaataaaaataatagcaggagcattttcacgtgccattctaaatacatctcgaaccatacgtggaccctcaccaaggtatttttgaacaaattcagatccaacaacacgaataaagttggcagctgttgagttggccacagcttttacaagcattgttttaccggtacctggaggaccgtaaagtaaaacgcctctaggaggatcaataccaatctgacgataaagatcgccttgtgttagaggtaattcaacggcttcacgaacttcttgcttttgaacatctaaaccaccaacatcagcataagaaacatcaggtctttcatctggacgaagcatagaaatagatgaatctgcttctggtggtaaaatgtcgactaaagcgtttgagtgtcgttgaagagcgacacttgctgaaggttttaaaagctctcgatcaagtgtacttaaaatacgaacgacataattagatccagttgtacttcctacaatagcagtattttgatcaatggcctccaagaattgtccgattactagaggcacagattgtattcgtttcacttcttcttgtgctcttattaattctcgcttgagtgatttacagtcttctttgatgaatccttcttgtaaatccagcatttctaattggcgctctagcgctttccagcgattgtacaaatcaatttcctctgtactattcattttgcgtatgtggtagttgctagaaataaaggtattgggaaacgttgagatcgaagttgcccattgctccaacacactaactcattcaaagtgttacgttatagtgccctaatgtctgtttttaataataaaacactatggacggaaaagaaggaatgaatacgttctcttttacaattattcaatatagttattaaggttcattgttactcatttttgcataagctattgaggcaccagacatttgtttgcgtacatgcttaggaacccattaggatttaagacccgaaagcaagtgtcaatttctcctttaccgatttagtaatttctttatatttatttgttaaatttctaaacatttaaccgataataataccaaatatctctcaaaccgtgaaaattctaaatgtttttaggcatcactaaatcctaatagggatcaattcatatttactctattcaattattgttattctattatatgcacaaattttatctttatattctcttattcaaaatttcaaaggataaacaatgtttaagcagctttagaagcatggtatggataaacagataccaagttcacttgctttcggtaaaaatgaatgttttttgatataatatttatccgttttaattttactaaaagaatgtgtgcctattaaaaattaaaggtttaacgattgattactttgtgcaacgcattataacataatctactgcaatgccataacattgataaagagatgtctgtttatgtctttaatcgatttatgtgcgagaaacagtaaatgaacgtaatctcatccttttttttcagccattgtttaaaaagtagaaaatatatctttggatagctagcagagcattgtcgagaaatcattatttttagttatttcagcttctcaatgtcgaatgttacaccttagggtaggtctttaaacagcgtgactgtttttggttttctgatcaacacactgaaagtttaggatcagttgcacagaaccaccaccaccgcttttttatcaaaatgggtgcctacaagtacttggaagagcttgctaagaagaagcaatctgacgttaacttgttcttgtctcgcgttcgcgcttgggagtaccgtcagatgaatgtaatccaccgtgccagccgtccttctcgtcctgacaaggctcgtcgtttgggttacaaggctaagcaaggttatgttatctaccgcatccgtgtccgccgtggtggtcgtaagcgccctgtccccaagggtcaaacatatggtaaacccgtccaccagggtgttaaccatctcaagtaccaacgctctgctcgctgtaccgctgaggagcgtgttggccgctactgctctaacttgcgtgtattgaactcttactgggttaaccaagatgctacttacaagttctttgaggttatccttgttgatccctctcacaaggctatccgtcgcgatcctcgtatcaactggattgtcaaccccgttcacaagcaccgtgagtctcgtggtcttacttccattggtaagaagtctcgtggtattggcaagggtcatcgtttcaacaactctccccagcatgccacctggctccgtcacaacactttgtctcttcgcagataccgttagagagtttggcgctaattgtaatatctcaaaacaagacatttctgttgttcaaaatatattagtcgaaagtattttttgtaactatttgtaagaaactcaggaagaaagtagttaactgtattcaacaataataagctcatggtatgatggctgttgttgagagtatatgtatataaaaaatactgtttaaaaagtttaaaaaatcataagcttatttattcaaatagtaaaaatatacataatatacatactatctttgacttttacttaaaatctaagcaaagaaggcatggagatagcgatgaaagctagaatgtgcttttcgttctgctcactctgttaaaaaacaataaaaaaaagaaatgtagtacattaataagaaaatggtgatattaactttatatgtgtattttttaataaaaagaagcaatcccgtatattataattgtaagaatagtaatcaaaaattcattgttataccatgagagaagaatattattcccttttgataatgttttgcattggatatcaccccaaagcacttatccattatttttcacaatctttctaattccaaaaaaatgtacaggtttcaaaaattatagtttaggaccggagtttgtcaaagtaaagttgtttatcctagcctagacaagaaagttaggaaatcataaaggcaacaaaatccaacaccaattcaattggaaaaaaaaaggtaaaagattaatctggaaaaatattttaaaaaacattacaaaaaagataatataacttccataaactggttaattgacgctcgagtgttttgagtttttttataacaaatcccccacaagtcttatttaattaaacaactgaaaattaaaacgttgcttatcacatactgtttcaataacatttcgttctatcacaaagctttattaaaaacgtctccatttagtatcagcctaactaaagtcaagggctagttgagctgcgatgccattttccaaatcttctaattctaaaacaatatcttcattttcagaagatgacatgatagagttctttttctcttcataagctcgactaaacgaataattagcacataagtaatacaaaagcccttaccaaactgcctcttttgaataaatccttaagtattgagtaattaattctaaagcacttggagtaattttggttcccttttctgaactgaaatacaaggtcagaatgcgtgccaacgtattgagggacagcagttcgctttcctgctccattacacttcaatgacagagaaattaattgatttcggccttgaacaagaggaggaggatacggaatttgtcccaggtgacagtacggatacggagtcgtcgttttctgatgctgattcaagtgaggaggagttcgtagaggaaaaagaagcctcgcaagttcaaagtactaaatcaaaaattgcaaccagtgaatctgaagatgttactcttaaaaatatagcaaaaaaaaataaaagagaaagaaatgataaattaatccctcaacaatcaaatgaatccgaggcaattgagaaaccggtacagtctacaaccgaagtggaactgaagactaatgaacttgcagaatcgaattcctcagttgccgtagaaggggatgaaaattcctatgctgaaacacctaagaagaaacactcattgataaggaaacgccgtaaatctccacttgatagctcgtcagcccaaaaggttttaaagaaaaacaagctaaacactcttgaacaagcacagcaaaattggtcaaagtatattaaggaacaggatattcaagatgagcttcggatcgccaataaagatggttatgtcgagcgccaggaattcttagcaaaaacccgtgctgcacatgaagaaaaaattcgagagatgaaaaagttgccgtaacaaaatggtttaaaacttaaaactagtattttttttaatgaagaaccccttttgtctaagacaccagccggcagcattgaacgagtccatgtcgattttgcgtttcttcaactacttcacctcctccaagccaggaagtcgttgtctttctaaaacttcatttgaaaatatccagatattatttaaatgttttatttaattggattaggattatttgatgaaaaggatattaccttaagaggcctagaaacagtaaaaaaatgtcagcgtatatatcttgaggcatatacgtccattttgctcgttcagaaggaaaaattagaagaactttatggtaaagaggttatccttgctgatcgtgaaatggtagagagcagtagtgatgaaatcttgaaagacgctgacaattgtgatgttgcaatgcttgttgttggtgatccgatggggtatgtttacttgaaagtacatgttccttttatttatcttttttttatttactttgagaaatttgactcagctgtttattacaggcttttagcccttacgacagcatctctcagttattaaaaaagctttggtttttgcgaattgtctctttaaagaacattcagtttgtcatcgaaccctatgatctgtaaagatttaattgtagtgaatactaatgactctttaatttgagaacccgtgcttttaataatcgtttattttttattgtattactaattgtttagagctaccactcatgctgatctagttataagagctcgtgagcttaagattcctgttcgcatgatacacaatgcctccattatgaacgctattggtgcatgtggtttacaactctacaagtttggtcaaacagtcagtcttgtcttcttcgaaaacaattaccgtcctcaaagtttctatgaccacattaaagagaacgttagtttgggacttcataccttagttttgctgggtaagttaatagattatagtagttggtgttctgacaataaaagatatcaaggtaaaggagcaaagctgggaaaatcttgctcgaggcaggaaagtatacgaacctcctcgctatatgtctgctagtttggctgctcagcagatgttggaagtcgaagaggatcgtcaagaaaatagtacgttcattttaaaatgtttttctattaattgttaaccacccttagtatgcacaccagactctttatgtgtggctgttggaagaatgggttccgatgatcaagttatatttgcaggcacattgcaagagttagctgagcatgatataggtcctccattgcacagcgtggttctcgtcggtagagatgttcacgatttagaattagaatttctacgtgcgtacgcagtcaatctcgagaactttgatcgtgtcgcaaaaacatacttggagaagtaattcattatttatcatactagtaaattgatgcttgaagtttttttttctgatattaagcgaaacctaatttttatgtacaagtcatacttgcataattaacttaatctgtagattaatcataaattgagagaatgtacaactggcttttgggaataatttctttaaatttttttactacgtaggtagaggtatattaactagtaaacggtgaaatgttcttggatcgataacttttaccattttaacattttaaggctaaggtaaaaaatataaaataaatagatccataataagaataagcaaataaaatcaattgaccgttaataacaaaatacagaaatcatacggcaatctaattttgtaatcacactgaaggatcacggatataaagattttttttcgaattaaacaacgaacgtaagagaaaaacttaaaaagaatttcttgaaacatcaataaggtcgtaagaaaattaatgcagaacagaacagaaaaaagagtgatagaataaaaagtgaggggatggatggaagtgttcatagacataaaggatagattagacagcacttctagcaatgcttcttgaaaagctggtaacagaatgattaccgaatggaagagaaatagagctagccttatctagaagctcaacccaagcagaagccggtccattcgggtcttcaaacgaccaggattttgttggagtctcaactacccagccatgttcattgttttttaccatccgacaacgcatgcctacactcttaataggtatttcttctttaactgtttttcgcccttcaccgtccgaggcaacacacaggtatcgaccaaaatttgtaagtataaaggtccgaggtttcctttttcgaaaaagactggagaaaaagcgaaaggcatcatttccattgataccagacatactataaacattgagggttccaatttttgagattttttcatcgtcttgaagaatactcgaccattccttgttttcctcctcaaggttggattgacacggcaatagagtgcctcggttaaaagtaccaaccggagagggtgcagcattggtggatgctgaaaccatcgatggaacaccaagaggcgaggtcaaatcaccattttcgtgtttgttagatgcattaggaacggaaaggctgaggacgctagtatgaccaaaaggtttaagacggggaggaggaagttcccaaagggtattatcaaatttgataccattaaaaaacggatgctggtgtatttcatcaacagttaagcgatctttaggatctagaactagcagttttttaatcaaatcagaagcgacatctgatatgtcaggtggtatctcataactcaaatgaagaatactttggaatgtcaaatattcatttcctgctacaaaagggggtttgccagctagcatttggaaaagaatgcaaccaaacgcccaaatatcggaagccgtaccagcaattttatcacttaaaacttcaggagatacataacgagcagttcctacaaacgatcgagaatgagcctgtggtttgtcagcatggtgtgtgtcttcttcatgactgccatgtgaagagtttaatatttttgctgaaccaaagtcggtaatttttgtacgcatattatcatccagcaaaatattttcgggcttcaagtcacggtgaatcactcctcgtccatgcatatagtctattgagtcaacgataagtgcagcataatattgtgcacatatttcgttaaatcgtcccaactaaattatgtgtaagcaaaaaataaaacatttaataagaaaaaagacaagattgtaataatcagtaagctatccatcatcaagctgcatgaacattatttatacataccttattgatataatccaacagttcaccatttcgagcaagactcaaaacaaaatacaaattgtgagcatcttggaaagtataaaatagcttaataaatccaggatgcttagagaggatgcacaaagcttctttttcaatgttgacgtatttttcctttttttccttgataatatgtcttttatccaacaccttaatagcatattctctttttgttgagttttcggtagctgttaatacagtactgtatgatccttctccaaggatttcgccaaatttaaaatccgaaactcgttttatgttaggagtcgatgcaccgctagacggatttggagtagagatatgtgggactgcagagggaatcttcggcgatgaatcgatctgagacgttgactcatttggtgtagtatttaaagcattagactgcgggatggcactattttgcgtctttggtaatgaagctcggtttagtttttcacttgatccatgatcaaaactaaggtcggattcgctttgagtatcattttctgcatcttctgatgcttcagtttcattcggattgtgcgtatttcgcataaccaatatctggtgtgaagagagtactgggtaggtgaatcagtgtcagtaaactacgaattgacggcaatgtcatcaaaagaaaattgcacatattcggtaaaattagtgcttataactgcaagtatacaactattgtactattgttatataagattttgctatccgggttatgatttgcatcgttgtgagtgcgaaaattaatattgcatggacattttagataaactaaatattcattcatttgatttagatcatgctttttttagtaactataagtttatttatttttttaaggagcctagagaagtagttcatcaaggtaatgatttatattactatgtgaatcagcgctgagtatacacagtcatacgcaaattcttaatggagtagagaaaatcattacataaaagtaaaaaaattgtcaaaccaagtattttcgtcttggctggttgaatagcattaccttcgggtgtggaattcaatatgatttaatttcaataacttaaaagatcacttaggttttaatgaataactcagtttatatacgaagagcattagaagcttttataccagaatcgtagctgaatatgcgggaaacatattttacttgaatttcaacttaccgtatcaattttacagagagagaaaattatgcaccattcagtttataaatatgaattatttgttcagcacagaatcaaaaataaagtgccattgtttagaattgcattttccactacacctaataggaacaaagtgtgtttgatttgtttcaatttagtgttgtaaacaattcattttggagatataacataaagaaaagggttggtatgaatgccaatatcttgctagcgaattcatatattttgcttacgaacaaatcttcattaaaggacaaccaacgcaagatttaactgaaggataccatctttattttaactattctataaatcaatttttgagccttttttttctggggtatatgcgtgagagaaaatgaagtaattacgatatagtacattaaatgagttttttgtccgtcaatatcctttttaaaaaattagttagtaaaataaagaatgataatgaagttttacaaaaaaaaatttgtttattgagtattatctgggtgaaaaacaaagaaaatataaaattataactggaattaaagaaacaagacgttcacaaacataaattagcaaattcagaaaaaattaaaaaaatttaataataatgacattttactatcagccccctctgtttatttaaaatattatatttttggaaggcatgtataccaaaatatttagtatctaatttttaagttgtgatgtaataaatcatattcctataatacaacgattaacttagatgatttaattttcaaaaatttttcatattcattttcattcgcctggacggatatgaaatatataaactccatttgtcagaagattaaaccatgtgaaattgtgaaggtagcgcattttacacttattgtgaaagactggaaattggttgttttcgtttccaaattgcaattttgtttttgttaagccactgaccttgaaacataataatattcgtgtaacacacaaaaagaatctaaatttggtatcataagtcgcaagtcataattaaactatcaaaaagatcgagtaaataaaagtagtccaactgtaacaaaaggatattttcaaatgatgaaaactagagaattcgaaatcgtaaataaatgaggatgtttcgaatgtttttaattacagcattcggttatatcaaccttatttaaagttcgcttaagcagtcattaattcaatatttatggtctttatccttaaagcaacttttcaaaattttcaaatatataatgatatatccctttcggatttcgattctctttatgtatatagtcttcctttcaaccaggtcacttttaaagaagcaagtggtacaaatacggtttcctaacgataacgctgtttaaagcataggaaatgaaagaagtgtcgttgtgcggttttactgtcagctacacactttattatctactttaacgatacgtaaattgcattaattcttacctgtaatctattatattatagatgcagattaacgagttcttttatgtaagtattcttataaatgagttatcctgttacctatccactaaaggtagcttaaagttaaactgaggactaagcctcaataggagccgtatctatatactacaataacacgcgctttagtaaactatcaacgaggtcttttttaacgttgtatcatagatgatatgatgtgtaaataaaacatgtgacatatagtgatacgcaacgtagtgtgccatatcgtagtgcagtattcctgacacatgttattactataacaaaccatcgttctgaatattttattatgctattcattattttgtaaacattaattttgtttgaattgaaccattaaacaaaaagaaaaaatgataattaagcttgattcattaagaatcaagatgaaggagaaatgaatgcaataaacgacaatgaatttgtaaatttaacaaggcggaacaacgagtttttcgatttcattagttgattttaagttgtcgtaaacaagttaaaccattattgtttgtgacttgagtaccattaaaaaagacacataattagactcgcatacataataaataaagacttcggtcctcaatgcacattatccaacatcgtagaatgcattggttggcaatttttgataactggaagaataagttaagcatatattccataaacttataaaggaagaggatgattaaagaatgttggtgcttatttttaaaaaaacgccgcagcttctctgcgttgatgattttcgtaaagaggttttccaactgtagcgacaactacattaataacgcaattatacttcgctttcaacttccatttcccccaagggaatgtcattattatcgttggcacctctaatcgcatttcctatccgcccacttgcatttcctataccttctaatcaggtaagtaaaaaataattcatagagtttttttgaatacacatacctaatataaaacctataacattcccagtagtgttgcgcatcctcttgagtacacctggacgttctgatatggttagagtaaattacaggaatatataacgaacccatttcgtaaagaaaaagagcacaaacccttcgatttcgtagcctctccatccgaaatatttaccaaataaagacattgaaccgtttactaatagtgcgataatgccatgtatacccaacacttgtagcatcccagataatgcacggcaaagtgtccaaattggaatacaaactgtatgttagcgtttagcaagataatttcacttaccaagcaataaaatgaaaaataaagcagccgaaatactgcatgtggaacagatgagtgccttatttaagtttagtctaccatccttgacgcaaccaaagagtataaaacaaatgactacccatgcgaaccagattgtaaccactaaatctttttttgagttatacaagccgaccgcaatcacctttacacattgtgccaaggaaattacagtcacctttatacattgtgccaaaaaaattacagttactttgactgccttgatccaagtttcatagaagcctaatgagttagtgaatgaacgtaagaatagtcctatcgtgtcacttacaccataaagaaataaaaatcattaggcaaatagcataccacactccaaaatatacccattcatctttgccataatctttaaagagagcgtccttatacgttagataacaaactgcgggtacgtttagcacaaagattgaaatgaatgataaaaatgcttttttcaacggagaggtagaagaattatctgccgtcccggaagaatggttttctctatgtgtgttaggaggattatttacaagtgcgtgatctgtttgaattaatataatgaaatactttagtaaagaaagaacatgtatcaaagtgtgtgcattgcatggccgactataaacaatgatcacatccaagttattttacagcactggcaagtttcaactttcaattgagtaaattcctttcttattatttacaattcttacctgaatatggaggtaatgcgccctcttcctccgaatcatattctgggagtggtccttttccaaatcgatttcatgatctgtcttcaattcatcttcttcatctagagaacttttcaaagaagtgtaattattcttcatttcatcaagatcattctttatttaataaaacacatgcgcgaattaattgctgtgattgcgacaaacgaaacagcgaaatcaagaatattcactctgtagtccaattccaaccacttcaaagactttttaacaaaataataaaattgttcaaacaaatttccaactaattccttcaaacaatggcataaaaaaagaagaacgaaaaaactgaacgaggcagtgaattgcttctgacacatttattttgtcactgccctttttattcaccccaacttagatttccttaaaacgtttttgagaagcaaaacgttgtagtataatataatgtcagctacgcaatttggtatctgctttaacgatacatagaactgcggtgagttttcctttgtgacctatgatattacaatacacaggtactataagtagcaattgagtatacgtgttgtattatctttaatttgttttgctacctatcactaatacagcttctaattgtgcaaggaatgaagtgcgtttgtagctttgtttttattctttcaaacaattgttatcatcggggatctatgtaaatatcgattaacggatctaacaactatcctatcatataacataatgatacgcaacgtagtgtatagttggtagtaatgtctcacgctaaaacgaaagatgcatatcatccagccaaagctaccataattaatttcagtacaatcaagttactcacttatattagtaacccgtaaataataatgattaccgtattattattattgttcacaattaaatatgcggtttcaaaaaataaaggattaaatgtgagggagtagagggaatggaaaaaagcctgttctggcaaaaaatgtgaaatccttttatattgttattaaacgacaaaaacatgattatagaatcataaacaaaatgtgaaagatattaaaagtatgaagaagtgcgtatgcgacaagtgaatccggtttcaacctattatttcatgcaggaagttataataacaaagttatcagtaagatcaccaagtacattttggtgcaatttatcgatcggatggggtatatgaagcttgatgtattatacttcatacatattcgtgactaatgggcagccgtgttgattggaactctttgagacgctagcttactacgagcgcgaattcggtcgccataaaagtagagagcataaatcaaggcgattaaagggagggaagcaaagcctacgacggctgtggcccaatggacgttcattcggctgaacattaaagcactaagatggataaagccgacagcacctaaattggagggaagctcgaaggcggcgacagcagatgctgaaacattgggatatgcatctgtaacatacaaaagcattgcctgccaaatgtgataatcggcaatattgaaaatggtcaaaccgatcaatgacactatataatgaatatgcactttactacaaaaagcaaacataaagataccaattgggaaaccccacacgtaaaacagagtcattataaagcgtgcttctggtcgtagacgattttgatgttttcgcttatcacgcttatataaccaacactgtaaaggctcaaaccagaggagaattacgcaagcaggcatggcagccatatatgtgcatgaagcagccatatctgacatcttataaattgagaaatacacaggccaaatggcttgtaaaaagaaatataaaagaccattgacaaagccgttgtatattcctaatgagcttacaatgggttcactaaagaagatctttatggccatgaaaaagacaaagtatgtgtcctttgccagtttcttcaagctgaactggggaaaccaggaaactggaagcccttgacgtttttgctcataacgttgtattacaatggcgggcaatgtttcgggggtaaagacgaagagaatgatgaaaaatccgcctacaataacatcaatccaatataaccacctccaagtcaactttgggttttcggcaaccccggttcccatgggtgagcccacggatgcaacggagcacatgaaaataaacatgtacatgccccaatttgaatcttcatcgcccaagacgtcggcgacagctccagcaacattgcctaaagcggtggagcccacgacacccatgatcagcatggaaatgacgagttgcgcataattacgggcaagagcgcaggatatacaaaaacacacatagatgattaaagagcctatataaaccaacttcctacccaaaaggtcggacagcggacccaagaacagagggcccaaagcgacacccaaaacaaacatactctgacctaaaagtgagacctgagacgacaagtgccacaactccataacagagtcttgtacaccaggatagaaattgggtgtccaaaatacatacatttgaagtgacgtggatagcaacacaatgtacgcttttttccaccagccccaattttgtggatgagcaggatgttcattggaaatgccagcaagtttataggcatagtcagagatatcttcgttctcttcgagttcgtatgtatcaagtttggcgatactattattggacaaatggggttcgacgaccgattctcccagctcaatgtctaaatcgttctaaagaaaagaatttgttagtgaaaatgccttcatgagcaacatccttttttttttttttttttttttataagaaaaagtgaaagagggaaaaaataatttttctataggactcgaccaaggatcctctggtactagcgcaacctctaaatcaatagtcaaacgccctgcataccttttttggacttatagactcactatggacatgcatcacatcgtttgtatcattcatgctgtgtgaattcgaagatgttattgacattttgctaatatgtaatgagcgacaccgctgtctcccactgacgcacaaaaagagagtgagacgaaaggacgagaaaaaggatcaaatacaggaaaaaagcaatggtaattagtcaagttcagcgaactcttgaatacgttttgctgggtttcctgcaaatacctgcaaaacgaataatgtaaacaaatccggttagtcggaaagatgggttcccctttgatggagccggctaccagcctctatttaaacttgctcaagagagaatttaagtttgacatcatagaagcggcttttctcgctattaatttgattggatgggtagccgttgatccgtgatcgtaagtttccgagttgccgccgatatctcccttcttacctcgtcgctaagggcggtctccaggagtctcgacgactgcccgcataagaggcgatcgatgaatggtggtatttggatgaatgactgtttagcgaatccaatcatcgatctgcctctgtaatgaccaaaggggcgttcgtcatgtgtacgggcgaagctaaacgctgcgtggtatgaccccatagggcgacgcttcgatacattaaagccaattgggaagctacactgaaatgccctattggggaaatcgctttaatattcctaggaagaggcggttattaggggataaacaagtaggaggtttatggatggataaagtgaataaaggaatgggagggaaatggcgtcgtacacatcccgttcatacattgacggcactacaaacaagaatttaactctgtgtatcgaaaaaaaaattttcgcgaccctttttcagctttatcagcgttgatggttgcttgataaagcgccaaacacaaaaaatcattcatcaaaattagtaccttttctgcctcgcacatacttccatgtatagactcatgtatcaaattctccatagataatatcggcacttgggcggaaagacgaaaggaaatttttcctgagaatgacttttaattcatcattggtgttatttactttctttctttttttttccatttgatctacatttgatcagatttgacgttggttttcgtcgtgcgacaatgttcattctttaattacatacagataggtgaattgttgtatacttattctctgttaaaaaaacgaaaattatgtattgttgtttggcgaaaaattggggaaagcgctttttgcatgcctttccaatattatgcttttcttttcacttcaattccccaaagctaattaggttactatcgaactttcaagagccctttttcttagcaaaggctcttctttgtcggcattttacattgctatctctctttttcatttcacctttcaatattctggctattctcatcggaatgacatgctttgttgtcacgcaactgtctggccatacttctttcgaatttcaaatttacggatatttacccatatagcgggttttcgaatttattatactcatctcgaccggatgtacatttagtcagtggtttccaaacattcatgagtcatattgtgtgcgaggccgagctgcattccataaagttttactaggaaaaaggtgagtaaaccttttatcaaagacttgctttactcttgacgtgatgcatataattaatttttttttgctttcttttccaactctttcttcttatatttacttctttagttgatgggctttccttataagcagctactcgcattgccatatatgaattcggacaaaaggatctattttctaacttcttgatccgattccttattttgtttattttttaaactccatattcgtttaataatccaatgcactgattctatacaaaaaagggagcgttttttttactgattaaatgtaagaattatttgcaacagtagttgaacatcaatcgttcatcaattcctctagctctgcaagctcttctgcagttaacttggtagaagggggtcccaatgatgggtgatcgtctgcttcgttgttgtctgcagaatattctaaatcccacactcttatcgtttgatccagggaagaactaatcaaataagatttccactgtaaaatttttgtcactgattcatagtgcccagaatatatatcttttacattaccagttgttgtatcccatacacgaatttcttcatctctgcatgctgttgctatatttccatcagctagagtaagaacatcagtgcatacgtctgggtgttccattctagtttcttcgtgtataccttgatacaaggaccattctctaacagttttgtctgccgaagctgtccataatgcctcagaatcttgtggatcaaacagtaaacaataaacgttggactggtgtccccaaaaaccttcttcctctaactgactgccgccaaccttagtaatatgccaacaccgaatactgctttcgctgccacacgtccaaaaaatgtctgtgttgggctgtctggtaatacactcgattccacgactatgtcctgtaagcttgtacagtaggcgacttggttgagaagaaacatcccatactattaaggaagcatctgttgacccagataacagtaatccctcttcttccagtaacagtagacatttaacgtagtcagtgtgaccaattagcgtttcaacgcattcacctgttgagacattccatttttttatggtatgatcccaagaaccagtgtaaatatgccgtactttgccgtcttttcgaagactttcaatttgacagcatgtgacaggacctgagtgtcccttatatgttttgcaagttttatttatttccaagtcataaagtttgcatatatgagaagcttcacacacaaatagtctagggaattgcttcttttttggtgtagtccgatctagctcaatattcaaaatctttgcctttaaatttctaggattcccatttggattatgtgatttctcttcttttcttttttcatcttgcaacgcactctcggagcgaaaaaagtatgaaggattgttggtttgcatttgatcgtcgccgtatcacataaaaagctgaattcggttacttgtattgaccatatattagttagtgcaatatttattgaaaatttaaattgttattaggcactttttatgttcgtcaagtttcacaaaaattcaaagaaatgcaaagaaaaaaaatttagcaaagaaaaatcgtaattttgaataaacagcacttttacgaaacaaaatatcaaaagcaattcaattaagtagtgttattaaagtattatttgctttaagaccttttttctatagtttaaactacagtctttataatggttagattgaggacaaggtgcagaactttaagattacaaattgacttctgagttcaaaacgcatattcgcgcgatctaattaacatcctactgttttctcagaaatctttttaaaatgtgaatgtaggtgtccgataccttcttagtatttaaatatacgttaagactatgattactataaaatatttaacttatacggcaaaaaatagaattgatacaatttacgacttatactactttgaaaaaaaaattaacttatatgtattaaaaaaacactcaaaagaagcatacgttagtgaaggttgaattgtttgtcgaaagttcagagaaagacgtagtcaggtaataacatattacattctacaatatacacattatcatttgcggcaaaattctttttcttcctgttccctatattctgagttggtatgctcaaaagctttttaatcatatacgctttaataaaataatttgatcgttttataaacaagaaattttatcctgattccattattgtttcataaacatgatgctgatatttaatcctttaatattttcttgtttataattttttgacatagttcgttagattgtctaataaatctgcctttttaccgctcactctaagtccacgatccctgagaatatctttaagttgactaacttttaacgccttcatatgaactgttactaatcaagatcttacaagataaatgaagtacttacttttatctccttgtccaaaactccttcgatgtaaagctgcttcagacgatcatcttcagcaaatataggttttccactcttttctattcgagcctttttcacaattggtccctgatcctcttcttcctcttttattccgtttttatcagaaatatcgttacgatattcagcgacaatattattaacatcgcccatgtactccccgacgcgctaaaatgttaacatggttgtacaaggcaactaaagctttcataccttttgaatagctttgtattttggtagagtattatcaacaaagtcagtcggaatttcttcgtcaagcgccagcgcttggagaactttgtaatgccactgcaaagatgggttgttatattttcctggctggtatgaacgcagctccataccacgtaaaatacgttgcatcgtttcgattaaattgctaggcatggatatcggattcggattgataggcgggagactacggatatcatctgctgttggaagttgaacaagaaatatacctagcggtaattcaaaatcgtctcgaatgtgaatagaccccggtgtcgctagcatagcaacaaaacaagggttagcatttggtctcgaaacaaaccatgcaataccaattttgtttgaagccagcagctttttatggatggcggagaaaacggcaccacttccaattatttcatcatctttcggcctcaaaaatacagcaggctttaagcagtgccagggttttagagttgaaaagtcacgaaacccaattatccgtaatgtaggaggctcaaatgatctcaccttgttaagttcatctgagccaaagacaacagatgatcccccgtagctatacgatcttcttatttcatcctttttaagctcctttttcgtagcaaaactgacttgtttgctttgaggaactgctacggcaaatcgctcaccttttgcatacacccaattagttttggctgattctaaacgtttcaacaagataaaggcctcaactccaattctcacgtcgttaccaagatccattttcaaatgaaaatgagctcttttcggtttttgtaaagctgtaatcatattgagcatatgttgcagctgagcttgacccctgttgactagattagacacatcttgcctaccataaacgatatataaaaagtcagaataaaatatgtttattctaaaggaatgtgtaggcggatccaaaaatactggatgaacttgaatatccaagtcccttaaatctttagcacgctgcaaaataatatcgcgttcagttgcatcccaagcaggatggtcattatctgtaattaaaaataagcgtttttcaaaattttcagctttagtagtaaatataacactgcaatgataaagtacactagacagagaaacttgacaagagcatggtttgaatttttcttttgagaattggaaatcttaaacaattgaacaaaattagtaatcagtggggaaaaagcatgaaagaaagtaatcggttaaaagcttttacctttttcaaagctttgtaagcttttaatacgttcagcatcaggaggatcaatgtctaaaagcatcatttgatttgcgaatcggcccgtagaggactcctgcgctgtggttagagacatttaatggcagaagtaaacgtcggtgaatttaaatgcagcattaaacttacagtaccatagagcaatacacccattatgtcgctgggatttgtgattactctttgagccgccagctggtacgcacaaataagtgccatctgcaaagagctgggagtaaattcatcgacaggatcaagcatactgggagaaacttcaatcacaaataaaatggcatattttccaattgcaaaattctttaaacaatcgtcagcataataatttcaaaacacctgcgtctaccagtccatattggtcatacttctgtctcatctatttgttcatcgttttccatgtaaaaaacagattatcaaaaacaatttccttggctttttaaatacgacaaaaagaaaaaagaagcacgcgtaattataaaaacgctgatattttatgtaaaccgtccgatgataacggctaaagcacacgaatgaaataactatttcattagtatcttaaatgtcaaataatttaatatattgatataccaatatgagttattaagcaccaattccaatatttgagaaaaataataaaatgcacaatggtgtcaacattctagtgggtgttttacacgcactgtgattgttgcgaatacgttaaatttaaagagctcaagtaaagccgtcgtaagttgcaactaatattagttcgttatagttcatttgtgtcggctacgcagtttggtatctgatttaaagatacgtagaactgcggtgagttttccttgtgatctattatattacaatacacaggttgtataagtagcaactgagtataggtattgtattaactgggttataatgttacctatcactaatatagctcataactgaactgaggaacgaggttcagcagtagctctatttatagtattcagataatatacatattaatagattttaattaagatcaatatcaatatcgtatcatacatggtacgatatataattagaacatgtgacatatagtgaaacgcaacgtaatatatcatagcttagtgtagtattgctgacaatttgcggttttgttcgtaacgtgtggaagaaaaaaataaaaaatgaggtttatgaacgatgaaaaggactagatttttgatataaaattgataataggtatacttttcttagttattggaaggattagtcacgggtttcaatttggcctttacttcgacaactggtaacaaaagataaaacacagagacagagaataagcaacaattaatagtcagtcttaagtcattcctttttcaggctgattatttttttttggtttgaatgcttcatcaatctgtttttgctcgaaatgcgatacaatatttagctttttaattcttaaaacttttaacttaaggtaagcgaagtatattgttttataattgtttagtgaaccatcgtgtaattatactcttatcttattgaatgaataacgattccttgcatttcattattaagaaaatatactctactatgtttaaatgaatttttacctgtgcagcgtaaattgcgttttcatcaaaaacaaataatattaactacagcatgggacgtggtggtaaacgcacttggtacaatggtgatcgtcgagaagcgaaaaggaaccgacctaattctatatacaatggagaaggtcggccagagaatttggtagttggagaaaaaaagccgaaaagaaaggtcgcctgtcttgtaggttattgtggtagcggatatcatggtatgcaattgaatcctcctagtaaaacaatcgaaggagatctttttgatgcttttgtgaaggctggtgccgtttcttcttataacgctgatgacccaaagaaagttgctttagcaagagccgcaagaactgataaaggagttcatgccgctggaaatgttatcagtctcaaacttataatggaagatgagaagttaattgaaaaagtgaacgaacacctccctccttccattcgcttatgggatgtgatccgtactattaattcttttaacccaaggacttattgcgaatctcgtatatatgaatatatggttccaacgtatgcttttgttccaccgaaaccttcgtccatacttggaaattgcattatgaagaattctcccatgcctgctgagccaattaacaaggaaaatataaatcaactcagtcgttcattattttatgaagaaggaaaggaattttgggatgattatgatattgcagccaaagagattttgagcctttatgaacaggatcctgaaggcttcgtaaatccatattctaaaaggggagctgctgctcttgctaattcggaaaataataagggctctgaagcaggagtttccgctaaaactaatccagatatggattccgattcctctgctattgtaaacgagtttttaaagcctgactctgttgaagacgaatctgctggttccaagattgatcccagttatcgtctcgaacgtgcacttaagcacattgaagtacttaaattaaaaaattaccgtatttccgcagataggctgtccgttattcgagaaactttaaaccaatatgttggagttcataactttcacaattttactgtggggcaagcatttcatcagaagaatagtaatcgcgtgatccgttcttttactgtaagtaagaattatcttctttgtatttatagtattcttgacaagtcttgtttctaacattctaggcatctgatccattcatgattggcgatacagaatggatttcatgtaaagttcatggtcaatcttttatgttgcaccaaattagaaagatgattgcgcttgctattttagttgtacgaacgggttgtcctgttgagcgcatacaagatgcctttaaaaaaacaaaaattaacatacccaagggacctggttttggacttttattagagtcaccgttttttaaaggttataatgaacataaagctccagagaataatcgtgatcctatcgactttacaaagtacgagcaaaaaattactgcttttaagcatgctcatatttatgataaaatttttctcgaagaagctcgtaaacaagtgtaagtatatttttttcttaaattaactaaccggtttagatttcattgttttttgtcttttattgacagttataatgaagaagatttcagttatttatcagatataggcattactgaaaagacgcaagaggtttcctcaaaattgcctgatgttctttctagcgatgaagaagaagattcggctgaaaacaaggatgatttagagggctaaaggattgattgtgagactgaggatttgcaacaaactgataccataaactttgctgtttcttttaaaaaattagactacaaacgtgtacatatatttttggagaatacttgtttctttcttttttttagaattgattattggttttgggttctattggtatttttatagtttattaacttctacttgattattccaaatgttaagaccgtatggtgcaatatacaaaataaaaaatgaaaaaattaatgaaatagaaactagatgaacggaggagaaaattaaaaagtcgaaaatgcgtggtcaagtagaccaaaatgtaaactataatctcataaagaatttaaatcatcaaccgaagcaaaatcaaaagaatttctttatagtggttggcgggcactaaaaggaatcactcgtcccaatatagtaccagtaacttgcataccctgctcaccatgtcgaaatgcagcagctattaactctctagtacgaaaatacgaatggcgacgttttacgggtaaaaaaactttttgctccaaaggctgattgccagatttctggagaacattcataatgaaactgacttcttcatcagaatcaacaggcgcttgatgctgattatcttcggattcttttgcagtttcgaggatttgtcgttgtatttttacttggtttttcttttgacaagctgcaagcaaaacatcgtatggctgagatcttcccggaacggctcgtttgcttgacattgaatgcgttttacatgtgagagatctggcgcacatttgcccattaggaagcaaaacaccgcattgcttttcaacatccacaggaccttaattgaatgttagtattaaagtaaacaggtactccattctccatattgaacagcataaaccaacatacctttgacctttggattcttcttcttgctagcctctttcttgggaagggcggattttgtaggctttttgttttcttctgtcttccgacgttttggaggcatttcaggattcttttgaccattaactgaattcttttcatgattcccagctgagcccttagctgtcgatttaacaccatttttgatgggtgcattattgccattgttgacatctttgtttaaaacctgagaattcgcaacaggctcaaattgaggcttaggaggtttaattccattgcatgagctatgatggtcctcaatatactctgataggaagggtcggtcgcattttgtgcatacaacataatcgagttctgaattgttaggatatgacccatactgaggaaaggaatcagcaggtagtaaaatttgagtttgattcgtaatgttagaagttatttcatcctttacctgtgattctgtattatcaactctttgatcagcgagtacatctttgggtaacccatccgggtatttcaacaaaacttgctcatttctttcccaattttctggaaataactccaaagtctgttgttctgttaacattttattgataagaaccgagtttataaacagaattctacaaagttgccctttgtcaattcctttgtagtgggactaaatctgtaagtcaagtgtatgtacggtttaatgcttccagaaagcaaagtctataattgcattctaatgaactttcaaaggattatgctgacacatatcatttctgataattactaaattatacagacattgtctttaagggctagactatgactgacaaaagaatttttgatcttggaattgaggacaaactacggatatcaattttgattaacaattctatttttttaggtcccttgagctaaacatagtttattattaaggtgcgcgcttttcccgttttctcgtacactgccaagaatccacagatcatgagggtgagtaatcatgaaatccggactccaaaagtaggcggctgaaaataaaatactggcagaatcatttgcaaataaaaagatagaataaataaggagaaatacttagtgaaattccaaaattatttgtttttttttacatcgtaccaaaacatcaaaaattaaggagagaaaaaaatagaaaacgtgaaaattaagctgaaaaatgcagtaagattgtagaaagattgaatttccaagatgaaatgttccgctgtttattttccgtagattttacatattgtttgctcaattgaagattacaaacgatcggaaagtatgttttttacagaatcccatgaagaaggagaaagtttgtttttcagttcatcgtacgtacaccaaacccagtcataaacgttttgcaggttaggtacatctaatccatttaataaacgagcacgtaacaagaaggtctagaaataactggttaaacaaaaaatcaacccagataaaatgagaacaaaaaatccgtagtcttaccttttcttgttccgtttttagtaatgctaatggatgacgtgcaactagccaagtcaacgaattttcgtctaatatattttttaaaagatcttgacataactacagtttgttagaaaggccaatctgcagactatgtaaacaaaaattgcaagagtatttgataaattatttagcatcaaatcaatagtaagtagtctcttgcactatattgtgtatcttggaatcgaattttaaaaaatgtacttaccagatgcagcgccttctcggagcttgtaacaggagtgttaggaaattgccaacccgagcttttagatttttttaccaacaagtaaagggacttgtcaagcgagcgaagagtgcttcgctcatcgtttttcgtatcagcttctgtgactctggattgcaagtgagttgcagaatccaataatttgttagactccatctctttcctttcctttccaaatatcgtctcaaagggtgattctttaccttttagtgttttttgtcgttcttgccaatctttttcacccaccgatcccttcttgaaataaaattctgcaggtaaaggatcactcagctcattccaaagttccgcattatatttatatatagatttttcgaattcggatggttggcgagtaagaattggcgatctaattaaaattgtacccactgaacaacctaagatatgttagcaatcatgtacatcaaaggtaatttttttatttatatttaatatccctagataattcattttcattttttaattctgtaccttttagaggagtcgagttagacaagggtttagaggattgaatggaatttcgtacagaaatgtgaaattgacgcgaaaaagacctctgcatatttataatatttctcttcaagtacattgtttaaacttagtcaatttacgccaagtaaatctccaaatttcggctttgtttactaatccggtaaagaccacttggtaaaggcaatcgacgtttcgctatggctagcactaccacctgttttaccagcgtacattacacgcttcgttaagtactgtaatatttcttagagactctgttgctatcgttaatatgttttaatagatttctttggatttcgttataattcaatttaactcacttagaatggggaattgctgacgcagtaaacctttcaatccccataacaatgtctgcttccgtcgaattaaaacgtaagaaatttggctaaattcttctaacgtgtggatagctacagagaagttcagtaaatttctcgaggagtactcttcggtaccggttcgcgccgccattattagcatttctaatggtaagtttccattcgggctagaagagtaaattttaagttagttgaagttactaaatgatttagagaattcatttgacgtgaaaacaatggttgaaaaatcagaatcgatagaatctgattttaagaaagtccgtgaatgtttgctcggatctgaagaacctgcatttgtcctcgtttatgatgatagcaagaaaaatctattacaattaatttcctatgtccctgaaaatgcgaatgttcgcaggaagatgttatatgcctctagtcgtgctgcatttgtaagatgcgtaactcttgctaaactcgacgagtcttatttcgcaagtactccggaagagttagattatcagcaaattatgaagagcttaagcaagcaagaggaccaaagtcctttacgacaagatgaactcgaaaggaaagagtacaatgaggtaggtaaactgtattggggtggatggatttttcatacttctttaccgtggctcgtagaatttatagcttctactcttttatttgcatctattttaacaactatgtagtctatgcaatcctcagtaactcataagcgtcctttggtgacccgtggtgttgctatgtcgattgatgataaagccttaaaggctctttctgatttaaaatcatctacagaaaacaatcttgttattttggtaaggaagctatgatacttttgctatgtatggtgttgctaacctcctttaaaagtctattgacaaagaagtcataagtttaagtcaagaaaagcaaaatatacctccttctgatgtgaaatccttcttttcttccaccgaacctaatttcgctttctattccctgccaaaagacggctcttcaaaaatttgtaagtacagatgcaggatcattttattaacaaggtctagtgtttatatacatttgtccaatgcaagcaactgtcaaacatcgaatggtttattcttcttccaaacttggtcttttggatagtattaaagcagaattgggtattgttattgatggcaaggtatgtttatccctcgtagtagattttatgctcacatgacagattgaatcgaatgatgccgctgatataactgaaaaggaaattcttcatgctgctgggatatcaagtcctcaagcagaaacaagcaccaccaaaactggtttttcgagacctcgaccccctagaagacgttaagcaagtatatacaattttttgcggtttcaaatttacagactttttagtttatcaatctttttcatgacatttcaaattcgaattaaaacaaaatatactaccaacgcctatattgagcacacgttgcatgctatattaacggtctcactttgcaatgcaaaatgttatacttcaataaatagaataagacaatcactagatctatacattgtttcctcttttctaaaagcgaaatccttaaagactccattcttgacgagtgttaatcttgcaaacatatattgttcaaacattaaagaaacactatccttcattaacaaaataaatactcttttggaaattgtaattgacctcaaaagttactttctgatttccaaaagattagatatgatataatattaaaagcatatgcaccaaaccataactcctatcataaatacataactcataatcagtcatttgaaagagactgtatacagttaacaaccttttcccgtattgtcttgcttattttatgttgctgaggtccttcaagcgacagagtaccatccgataacgcagtgtatacagatcgacagatattcttattgaatagagcaaattgatctttagatatttttgcttctcgataataaggcttcagagctgcgttaactagccgttctattcgatacttcgtttcataagagacttttttgctggaatgcaccaaatcatgtcggcccgaagtgcgtcgttgatgcatactcgtatcattaactaaatgattatccacaatttctcctggttccgaaagttcaatcaaatggtcatccaaattatcattactgatttccctaggtgatagcggtacgtgagatggtcgaggagagagatttgagaaaagaggagtcaagtgaacgtctgaagttccatccgaagcttcagagtgagaattcttaatctcatgttgtaaacttaacataaaggaagtatctattcgtgaggtgcttggctggttgatgttgctaattaaactagcgagaaaagaattctctgatttagatgatgaattattgcctaatactgtagaagatcctgaggatttattagaacaaggaatgtgccgacgagtaggtcgcttttgcctcctgtcgtgactcgtggaatttgggtcattcacaaatcgagtatcttgttgatgatgttcttctataggcgtttgctgaaatcgacccgacgaaggtcgtgggttactaatggtagcctcagtggcaacggagtggaccgatgaattcgcatgtagaatttcatcaaaatcattccatgcttgctgctcagaagcattcgttactggtgtctgcactactcgtggctgctcaactggctcattgagctggttggaacgtagacgtgcactctcaatacgacgtcgcaaaagttcagacgagacgtcacgagcaggcagtcgttcttgttgcataccataatatgagagatctgaattcaatgcatcccaagctcgatttctaatggcattccaagcacgtgtccatgcacgctgctgttgttgagaaactcgcgaggcacgagcagctgctcctacccttctgcgtcttgtctggcctcttcgagaaagagaaatacgtgaagagagtgtttcattttcttgatagtttaacaatacacaattagggcaatagaactcttctataggtactgcatccatgtttaagcaatatgtatgatatgcatcatcacacccatcgcacaacaaaagcacctcagcatgatcagagcggccacatatgacacagcgacaggtttcggaaccttcgtcttcaaacggctcgccagcattggcaacgctttgggttttctcctccacagggtatgcacgataccagggtcccttcacgaattcaagtacgtcaactttaagaaactccgttctacatagaggacatgtatttgcaactctgcaccatgattccaagcagtggttgtgaaaataatgtccacaaggaattttcgcaattcgaagaccatccaaggtcgacgaaatcgaagcgggaacactactggaatcccattgatctaagggacaatttggtaaattactaagacagatgatacactcttcagagctatcagaatctgccggctttggatcttcttcagcgttcattaatgtgggggccggaaccacaacggggcatttggtggtgggggcgtaaagcagtagttatacaacgaaggtgatggtagaaggagagaaggaaaactggctctttaaggggttcaacattttgtttaacgagtttactaacgttattttgaagttacgcaaacgagagagatttgtaaagtatattaacaatttccactgtactacattatcataatgaaagtgatcgatcgacagtattgggagcagagtggaaatgaatagtttaataacaaggaaggaacagtttaaacggttaaagagtttgaaagtgaaagaataattttagaaaaagaattatcacatatattatagggaagatatagaaatgtgaacgaacgatactttattatggtaatgttaatttcatattgaatgaaaagagaatgaagaggtgaaagaaaaggcgattaatacataacatatcgtggcaaggaagaagtatgggtttatgagaaaataaagtactagacgatatggaaatcaatatcgttgagatatatgaaaatcgtgctgcggaaagaaagaaaattcgcagaaagactttttgctttaaagtacggtcgtacgacggttcttctcttgttgaacctgataagagcgaagggcaaagatggaaaagatgacaataagtgagaggagcaaaataatgagacgctttttgaaggaacccttcttctgtccataagtagtacctttcaattcctcagcaggaatttccggagttccctcatcgtcaatatcggtaattgtacggctcaaaatactggcaatttcatgggattcacttaaatcaccagtatgagcgctgaaactcataaaggtggtaagaggtaattcgacttcattaagatcaaaacatttaataaagctagaagaaccttgataagcaatttcaaaacgtagctttttggcatttttgtcatattttagtttacccaaattatagtcatttccgcgaacgttcaaagcagaacagcttgcaatctcattggctttgccatcgttttcataatcataaggagtatgtccatcccccttcatcacaattacacgagggaataaagttcccggacgatggttgttgtacgtatcaataaaaatgccataaccattaaacttgtccgtaaatccaaaaaccggtccaggtttggcgcgctcagcagctaaaaaaaacgcaagaccatctccaaaaagggaggttgattcactgttaatacgaaattgaaaaaggacttcaaagctgctagacggtgttggtaaacgggtggaaatccatccctgttggttttggacgtcctgggtcaagaaaataccgttctttctatcaataacagtgctaccaccatattcccaccataagtttctcataccatggttgatgtaaggagcttccaaagacagacgctccaagtgactggtttctgccaatgcaccaagaacaaacccaaagattcccaaaaggaaaacattctttactgagaaaaacatattaaataccgcctttttttaaaagaacgcagtccacacttctgctgcgtgtcgtttgtagtggtcaagtgagtcagtgtgcttccaatgccagaattcccaagtaggtcacgtgtcacctgaaataataaacaatagaggcaggcagagctgaaatcaattgtaaaagctgtaaaatcacaaagagtagagagtaaagacctagaaaatttagcattaacttcgtttacttcatttctaagtcaagttttggaacatgctttgtttgaatgaaagacctttgaaacgcccaatgtttatttgctttgtcgatgaaataaaacaaatggattttcataggaccaggtcataaatttagtttttattttcttttagatgatagtattatacaacccaaacttgaagcttgcaaaccttgacttccttcaatcggtacgatcgtgctgaatggtcacaacaggtcctttcagcagaaatagacaagatttttagagaacaagcttagatcgtgtgatgattgaaagatattctaattgtccaactgccaagaaatactttcaaactgaaattccaattcatcgatataacaaagcaatctcagtaaaaatatgctaaagtggttaacgtcaatactttatttcaataaattcgttatatagaatgtcgatcccatccgcaacgctattatttttaacgtactgttgaatgattttagaatttcataaatgagctactatagccatgctccaaccatactcaagtaatttccatatttaaagtcatgaataattcaaaaggctggtaagtaatctgttttttatgttttctttttttcttttaagatcatttgtttttcttgtcttgattgttggagatctgatgaattggtaataaatcggaaaatggatcttcgtcacggaaatccattcttgatgttcggaatttgctttatcgatttgttgaaatcttgactgtcagataaaaaattcaaattgaatttagtggacgtacttgttggttatcttttcatgtttggctatggatgaaaatcgtatatcatgtcaaggcttttgttataccgttctgcttgcgatatttggaaatggatttatatctttgattttcaattcaatattccattgtcttcatttagtgtattctgcttgacagttattaaaacctcaaaaacaaatgcggttctaaacatcaagctaatttgttgatgactgagatgagcatacgcctttttttacatctatctaaagaattttatgattgctgtggtctttttttacttactttttttttactaactacttgtcaacttaggatactaagcctttctattaatgctttttgcgtatttggtgctagtggaatatatctcgataaattagtcaacaaatggtttggttacgaagtgcttgatttagcaaacagcgataatgcccttgtaacaggtctcgctactagctccggtattttattgtatagctcatgggctagcgtgatgcaagaatcctttcacttcttagagaaaatttctatgttcgatacttttctcgtgcgtgtatttcagttttgtgctttctttttcggcggtatagtgttttacatttttaatcactttcttcacaaatggcttcacgaatcaagccaaactggttttttgcatgatcatttctccgtaagtgatccctcgccctccaccgcacaaaaccaccgtagtcctcctgcatcttgtaagcgtttatcgtcttgtgaatcgagtggttccccatctagccgagttgttggatctttgcaaggaagttattgtccaagcggtactcatcttcatgaaggatcattattgttggaggatagctccgctagacattcttctgattctgttcatgaatatttagtaaaaaaaccctctaattgcgattgtgaatgtcatgcgcacttctccagttttccaacgcactcaggaactcctgatgatattgagcatattcattccgtttatactatgggcatccagaccgctttgcttatctgtcttcacaaggtgcctgagggcttcatcaccttcttagcctctaccgttgatacggggtttatggtccttgttgcaatgagtattcataatattgttgaaggtttcacaattgcgtatcccctttatcttgcatggaaatctcgtcctaaagctttccttaccgccgccacgcttagcagttgcagtttacctcttggttctttaatagcctttcttgtaatggaggctggaggtattggttcttcggattttcttaattttctctatggaattatatttgctggaacagcgggcatgatgctaattctttctcttcgggttattcttcctgaagctttaagacacgatcattcagaaaataaaaggcactctttcatttgctttacaattggtatactttttaccttatttttggaaatctttgatagccattagtgtttccttcccgcttactttaaaaacgataacaaaaacttaatagtatatttggcatatcattgccttagaagcccttctccctttcatcgatgttttacttccctttcttgaagtaaatttaatataccgaacacaatttttatatatggttttgtgtctctctgctgccatgctaatatactatattggcaaaatttgttcggtactaattcttctcagttcttaaatttattgtttttttataatattattatttgtgttccttctctttcatccgctttatttcagtttttaggttttgagacatttaatggtcatacttccggtttattaatttaacacctgcgatgtgtggatacaaggctaaactttttcaatcttgtgtattttttttaatatcaatttaaatataaatggcaattcgttacagtttgtatgctccttcccgtttcgcagatttttaatgaattctgtatcgatttattaagtatcatacctgattgttaatttgatattaaaaaaaaaactggcactcttaaaaaagcgctttgaatatcactatcgtaattaataataatacgcttggatttggagattgattatacgcaagtgttccagcttaatcttgatgcgcacacttctaatatattctgttcattcaattcctacaagttatttaagatcatgcttatttggtgtttataaatagcaatgtgtatccaattcaaagaagaataatcagtattgcaatgcacaagaagcttttgaaatgttgctttgaagtatgtttagatagatttattgttttgttataagtaaacgcatatggaagttctgacaccgtttataataaaaataaggctttatagctgattttttagaccataaaatcgaaattttttataaataggtcctcatacttagtaaacactagtgtagctaaggacggttttccttcacctttttatagtctgcgttcactagcggttgataagttggctaattcctcaaattcacactataagtgaaaagtagaaatatcataggagattttatttgtaatcattctcttttttagcaacacatttttactcaggatatcatacatactctgctaaaaactttcgtattttgattttcgtggaagcaattaccattaggcttaccgaaaaggttctaatagctggatagaaaaaaattattgaacaaagttcatatagatttctacgagtaatcctaaatgtcagactctcaagataagaattatatttctttcgagaagaccgagattgggcagatcgtttcagaggctccggcagagaaatacgtttcttttcaaaagaaatatttcaaccgattaactatcattggagattctataacacagaagggattcacgcctggaggatattgtgccgaattaatgaacttttaccaaaggcgtttacgagtcgatgtttggggtttctcaggatatacttcaagacatgttttaagatatttaccggaaattccactggaaattgacagtacaaaattgttaatcgtcttcttaggaacaaacgactgtcagttaactgaaaccggatacatgtgccccgtagatgaatttaaaaacaatttgttagcacttaccagaccatttcctcattctaagattatcatagtatctcccggtatatgtacaaaggacatttgttttaaacgtgaacaagagccatatgtaattgctgcttctgaaacagtgaacacccttaataaatctaaagctaattcagcaggtcttatcaatctttatgaaattacgaaatcctatcccacgcccgagttgctattcacggatggtcttcacttttcgtctttggggtatagtttgttattcaacgaaattgttgcaacgatttcaaaagcttggcccgaattgctaccgaacaatcttcctcttcaatttcctcattggtctgaaattctctttacttaaattttttcggctcatgaataaattattgattattacactctcacatgcttttcgcttataattatttttgctaactagacataaactaagaagcattcgcacggtgataccgaggatctatgccgattttaaaatcattcatggaaatgaatactttacatggatctcatagtactcatattgtatatgattaatatgcatgacccagaatcagcttcgatgacttgaccataaaactaattttatcattgcaattaattttatattcctagaaacccctattattgtcaaaatcaaatccaattttcaaaacagtagaaacgagggtatcaacaatttactatgtcaacagaaggtctacaaaaacaaaacttgatttcgtaaattgtaacaacttaaattttaatttttcaaataagctactcaccaagaatacattcaaaggaaaaatgggaaggaattaacgtccgatttttaacgctttgtgaagattaaagagttatgtacagagtttcagaataagaaatacgatgagattctttataacaagaactggtttgagggaaggcagaaattgatttaaaatcaaaaggtagaaacttgaatgagttttggtaagtctctaggtttcccaattacagataacgtgaaggagtatttcagaagagcgatatggacagtaggtatcatattaagtcacgtacacttcagtggaagcaaaaaataagtatgaaaagaatctaacagctgcaaaaagttcatttcttttgagttcttctctttttactgttttttttaatataacaagagagtttaaagccatcagcagttacgccatcgagcttttggacaacttgctgagcacttgcgagggtactgaatcgaacactagcacgcacctttccttgagaatcgttaacttggcaattcaaaatttccccaaaattaagcaacgtagcagcgacatcgtcagaagaagttccgggagcaagattttcaataactacgttagtgggtccggcgataccacggatcgaaatagcaccattgctttgggaattagaattggatggctttgtttgattttctcgtactataccatcccttagttcttgcgaggggagagtcaaacggttaaaaagctcattattcttcagttgcttaacaatacgtttatcaaacaaacttttatctgaagttaaagctgatcccttcacaatttgttagagtaaaaaaacattggaaaaaataaaaagcatacggttttagcatttgttggtttcccaacacgtccgccaactgtatgtttgcctagcgacagcggtgctatgtaaaaatatgttagctttattttatgggtttccagctacgattttaccttcttgcttctttttgttgcctcgttttgccatccgtccacgagaacttattaggtgcgtgttggtggtagtgctgcttagtagcaggaattggaggtgagacgggagatcctatatcgaacataaacaagagtgaatatcaggtagaaaacctgagaagtttaactgtttttcttgagcttctatttaaaattagtcatgtaatcaattcattactcctatttcaagatttttcaatagatattgcaatcttttgatgatgaaatatcttgaatatttgcatgcatgttggtcatagtaccattttaaacaattaagattcccaaattatacatatttcatccttcctatagaccttggaatgaccttaggaaaaaaaagagttgtttacaaataattgtcatatagaccaattaaaaaaaaagccgacacaaaaggtccagttatattatatattgaaatgtttgaagtgtactattagcaatatgataatcaatttaatgtgttcattaaaatccaaaggagattaatctgctccttcttaaatattagttcttgtttctttcaactctttctttacagtttttttctgcacggcaactgtgagctgtagcatttttaacgcttgaggagatataaaaaccgattaatgcattaccaatgtatatgttttgaatgtaacgagtagtctaagaagtactagaaccgattgaatgataatgagattgcattcgaacgtttttaaaaacttgatgaactagaacactagacactaaattgttttgtacgtttaataaacgagattttttttcctaagaatttatttcatgtcccgaagaatacgcactacaaacattaaatactggatgctcttttacaaatgggatagaaatgcctatggcctcttcctttgactgaaaaaatattttctataaacagaggaaattaataaacaaagtaaatattcaaattgtgaaattaacactcagcatttcttatatagaggcatttgcaagcgtagatttttttagctgtattaggatagataaaaaaatatcggtaaaataataaagtactacctaatcgttttttaatgctcgctatgcagttcaatatttttttaccgatacgcaggactgcatagttaaaattgtgtattgctacgcgttgctagaattccttcatgctctacagaatttagcagatttgagaaagcatatcctaggactaagtgttgtcgtaaacgtggtcttacggtcgttcaggaatcactgcgtttaatggtatctttccccaaatatgtctaaggcaaatatttcttccaaattaaaaaaagtagttgagtccatctataatccaaaattggcggattcttgggacaacactgggcttctgcttgaggctcctttcccaagaacaaatgcaagttccgtacttttgacgattgacttgactgagaaagttgctgaagaagctatttcaaataaacttgtatcatctattgtagcatatcgtatggcggttaaccttctacttttattgtttacacaacttactcacaactagaccccattatctttcgtgggcttaaagccatcacgatggaggatccccaacaaagaagccttttaaaacttgctgctgaaggaattcacgtttactcgcctcatacagccgttgatgctgctgttgatggagtaaatgactggctggcccaaggtatagctggaggacgaaacaacattaaaagcgtggtcccaactcagcaaaattctgtcatggctgaggcagaaggttacggtcgaatttgcgaactgaagattcctacaaccttgcgtgaattggtccaaagggctaaggagttaaccggcttgcaatatggtgagcttctttttatctttattgttaatattgttaacctatttgattgtagtccaagtgtgtgcacctaacggattagattctcatatttccaaggtttctttatgtgcaggttctggtggatctgtggttatgaatacggatgcagatctttactttactggtgaattgtctcatcatcaagttttagctgcgatggccaaaggaatctcagttatattatgtaaggaaaaatctgttcagttcacctctttggtattatatattattcaactaacaacaatgtaggcggacattccaatacagaaagaggttatttaaaggatgtaatgtgtcaaaaactggcttcatcctttcacaaagaaggagtagatgcaaatgtgattgtatcttctatggatgctgatcctttgactaccatgtagatttactaaaataaaaagctgttacttatttaacataaattgaagaaatgctaaaattaaattgcattaattttgacttttcacaaaactcataatttgtagattcttcttactcttctatatgaagtacattttttagagaaccaaactggttgatcttgaaccaggtatattaggaaatttttgatttatgttttactaatataatatcggtcataatgatgccaaagcttcaaaaactaagctttgtttagctaaataaaaaagtttcaattatttactctccctccgggattcgaacccgggctgcaagcgtgacaggcttgtgtactacccctatactaaaggagattattgaaaacttattttttttagttatacatattgtaatactcatattaaatttaaatgaaattaaataattgaaggaatatactttggatttagttatgaaacgaagatatcagcttaaagttgttgtaaaaataataagtgattttgggctgttagcttgtagcaccgattcagaaaataacaattcagcttcttacagctgttgcaaacggagtaaccttgattcatgttcatttactctagcaatgataacatcgggctgtaataaaactttataaatatttaagtctgttacttgcctgaattataatttaactgtttacaatccgttttctgtttgtatgggttgcgaatggttttttaattgtatttaggcaaaaaaaaaatacgagttttatattttgaaaatagttaagtagccaaaggtgagttgacagcatttttaaaggaatagatatttacattatgaggatcaatggtgcatttatcatgcgaatatcaaccatgttaataatagaagttataattcttttttgaaaaatagtttcaatcggatttccgaatgttagcgctattaaacaatggaaaacattaaccgcttaatccatcgcttcaaaaaaaatgataaaagattctgctatttaaagtgttgaatcctttccaatgtgaattataataaaaaaaacgctttcttttcctacagcatatatataaatttagcagaagtgattcctgaatccttgataggcctcgagctaaagtatatctccataactcaataaggaaaatagtaagtacactaacaattttttcttaatgcgtcaaaggtttttttaagagtatgggaaaaaaaaatttctcaacttaaagagcttcgaatcttttcaaagcttcaaagcttataaacatacaatatgagattagtgaacagggttgtagcggtttatgattttgtatataaatagaattaagataagcttttaaataaatcttacaatagaattcttcagtcatgcacttcgttttttatatcgttctcaaacccattaaacttccaaaaaatatatatgtaccatccgatcaaggaatcacttttttattctaattttatcctcttttatggtaacatcaattttgtctccgcattttattcccgttcttttcaataatttgttgccttgaaatagctttggattgtgcaaacaaacagtacctagatccctggctatcgggcgatctttatacttatcgtaaaaaattgttctaatttgcaatgaccattcagaatgtcttgtttcttcgttattcaaaagaagttgatctgcaatgagaactcccagttcataaagggtcatggtcaacctaagattaatcgttagcataaaagtttaagatttgaaacatataaatctaattgacatataaattgttcatggatgatcctttgacggattttctaatcgtagtcccaatgaagtatgagttcatatacaacaactgaaattttcccgttaacacgatttacttaccatccataaacttgaatagaaggaatcacgtcttcaaagatgtctaaaacatgattttttgtttggaactgatgatatactgaaatgagaaaagggcacggaccaacagcatcttcactttggcttaattcaggagattgagagcgactttcacgaatatccatttctaaacctcccaaatggattttttaaaggaagaaattgaacgtaaacgtcgccaactagaaggaacgagcgaacttccggtaaaaaaggcgtttcgacgaggggattgggagaaggaaagggaaaagaaatatctgcaggaaaaacaacaaaaggatgagcaaagagagttgaaaaaaagaaagttggaagaagaacgtcttaaatatgaagaaaagaagttacgcatttcacgacttgcgaacaaagagagcagtagaaatgaagagttgcttacagaaacaacaactccctcaccagctgtcaaagcgtcacctgcaagtacaaaattatctgtctccgaaaacgaccgtttatcaatacctgaaatcacaaaagacaacctcacgttgaccgaaattattgcaaagcttcgtgagatgaaagagccaattcgtttgtttggagagtcagaagaggctaccattcaacgatattacagtttgctaaaatacaaaaaactggaagaaattgaaaatgaactccttactaaaggagttgaaacaatcgactttgagcatgctactaccaccaaacccaaagtatccaagcaagtagttgcttttcttcaacatggaatccgcatttgggacaactttttgtcttcaaaatccatcaactctttcgaaagttctgagagtcagatgcaattaaaaatatttcgtcaagctaagcaagatcttgatgtacttatacaactgatagtcgatgaagctttaaacgacgatatttttaaaagcatagctgaaatttgttacagatgccaaaaacacgaatttgtcaaagccaatgatatgtatttacgtctgacaattggaaatgcaccttggcctattggagttactatggttggtattcatgaaagaagtgcacatcaacgattacaagcaaatccaagttcaaatatacttaaagacgaaaagaagagaaaggtaagattttagataaagtacccagtctaacctttcacatgttagtgtttgcaagctttaaagcgatttattacttttcaggaaagagagtcatcaaacttacctgaatatacggattgaagtacgaaaaagatgctatttgttgtcgaaaaagaatttaattatacagttcacactaaacttttgaaaacgactatgtcaaacatggtttactaatgatagaatattcaaaaatttcgcctctgaattggcatgaaagaaactacaatgaaacagcttctgatataacgagaggcgaaacatttataaaagacagaaaaatattaagtatgccaccagaactcagtcttaaaaaagcagaatgtgctgtgcaaatgaactcatctttaatgaaactctacatccatactcattattaggaaaaaattttttgttaaaagatgacgagaaaaaaaatttactaatatccatgagcgtttgctaatagtcgaaagcacctatattcctaatatttcagttttaaacaataagtttactccaaatccaaatcatattctggttcaattgacttttgttttcgctggcttgaagatgcttggggagttggcataggaggagcagggcctcccataccagcaagtgcagccattggattcatacctccagctaatccaggttgcttttgcatttcctgcatcatttcctggaacatattttcagagataccaccgccagataaagcaggtgaatgaagaggtaaaatcgtatttcctaaaacccccttaggatatgcaggaggattttcaggaagacgtgcgggaacattttgaataggtaacgataaaggatctgtcttaacagttgggcgaagaagtagtactttggcgatttcgtttatgacatacttttctacattcacagtcagttagcatacgagaaaataaaactaataacaatcttactttgtattttttcaggtaataccatttcgactcgacctggattgacccaatctgcaggatgtgtcttcaatggttccaatttacatttatatcccaaatcgcgaacaacatcggcaatatttttagctaacggatttaaaattgctttgtcttttggtacacaacgaaacctacgtggacggctcttgtcaaagtaaatgggatataatatgatagatggcatgtggatggtgagtgaggtagttggcagcaaatgcgatatcatacttatgctgctcaaccgtatgtagtagataaatacgattttactttcaacttactactgaacatttcaattatttttaaaaagaagacgtttttcatgattaacttagaataaaactaagaacactaaaaaagtaaaatcgtatcattcactgggaagatcttaaaagaatacaaaatatattaaaaaaacgatgaaagagagtgtgcctgattggcttaaaggtgagatcggttgaatcctacaaatgaaatcagtaaaataaattggaagaagaattagacttgtaaaacacaaatctgagtggatatcttttaaagtaatacaaacgctctgttgctaatgatgcatgagtgctaaaaattccctctcgcagcaataaaccgatatgtaacgatgtatgtattttatgataattgacaaagtctcatcaactatattaatggaagaagccgtacacaaaaatcatgtaaacgccaacaattttctacttaatttttttttttgaagataataaaacggtaattttaagggatcggtttcaggcataatagggaagctggatttaaaagaaaagcgaaaaggtagtaagaatatggatgaatgaaaggggaggaaaataccttcaaacaacaatggtccttaataaaatgatgtatatacacatgtatattccttttgcgggcatgaaaaaaatcgcaatgggacacatgatgaataaccgaactacgattaaataagcaattagttcacggtttccgaatatattgaccaaaaaaaggaaattttcaaaggaattattgacgcttattattagccaagtctaaaaaccagtgagttaataaggctaaaatttcagtgtttaacaaatcatggcttacctctacgacaagcatcagctaataaaatagtatcaacatatgcacttgacatatggacgtaacgaacaacgctaccacgaataaacaaatctttaacagcagcctaataaattattagttataactctggaataatagcacgagatagtgttaagagtaggaacgaaaaaaaaaggatagatcgaagaattcagaaagtgaggcgcactttatgatcagtcttaaattgttcaattaatgaaaaacctagattttaaaagttgagaatgtagcatatacgttgggaaagctgattgattcatgttcctctcatgtaagatgttgtacataatcgatttggacaagacttttttcaaaaatcaatcaaaaacctaaataaaatgaataaaccgaaccctaccgatcgtagaaatcatttatttctctttcaattcccgataacttgcaaagcataccatatgaggatatttcgacgcatcgaccacagaaatattttcaagcttaacgtttaaaaactggtcaacagatttcaaaattcctcggatactcatatcattctatagtttggttaacctcataacgcgatcaaaaaagccaagtaggggcataccttcaattccacggtaacttccgtgtctattaatgtcttaaaaaatgagtaaaacaacattataatcgggagaagactcgttttacacgcttttggatgaagtaagaaagatgcagcgaacagaagaatgtgtcatgtacaggcaaagcccatttacacggtattgtgttggagctcgtacatttttttgcgaggatttacgaaatcaaaaaatcatattaaggctgtcaccgagattagttatgatacagtacgttgagtgtcactatatgttcacatgttccatttacatatcgcaccgcagatgatacgatgttgatattaattttaacaataatctattaaaatccaaatcatctaaacaacgtaaatagagttactgctaaacctcattccttacacaattataagttgtatttgcaatagataacaatacaacttgatagtacaatacctaaactcagttgctacttatagtacctgtgtattgtaatatcataggtcacaaaggaaaaattaccgcagttctatgtaatcgttaaagcagataccaaattgcgtagctgacattatattatactacaacgttttgcttctcaaaaacgttttaaggaaatctaagttggggtgaataaaaagggcagtgacaaaataaatgtgtcagaagcaattcactgcctcgttcagttttttcgttcttctttttttatgccattgtttgaaggaattagttggaaatttgtttgaacaattttattattttgttaaaaagtctttaaagcgattggaattggactacagagtgaatattcttgattttgctgtttcgtttgtcgcaatcacaacaattgaactatttgtgtgtatatcattaaataatagactgtcgttagaaaatgaagaataaatattaccccttgaggtcgtctatggatgaattgagtgcaaaaaacgataatgaaattgatttggaaaaaggtcctctcccagaatacaattcagaagatgggagcacattgcctccatattcaggtaagtgttgtgttgttggtagataagataaagaattgagtgtgtcaaggattatttgctgtgtctgtttgttttgatttacaatgtttttgttgtgtttgtttgtttacaacttgacatattacgagtataaattcgtctaacagggcacgctcttttttcctttcccattaaaaaatattctaaagttaccattgaattttgctaacaatatagaaaatataaatttaaaggatcccaaacaaatgggagctaacaaccctaacttatttaatacggacgagtctacgactcctccggattatggtgaagacagtctttctattacacatagagaaaaccattcttccgggacggcagataattcttctacctctccgttgaaaaaagcatttttatcattcatttcaatctttgtgctaaacgtacccgcagtttgttatctaacgtataaggacgctctctttaaagattatggcaaagatgaatgggtatattttggagtgtggtgtgctatttgcctaatgatttttatttctttatggtgtaagtgacacgataggtcaattcttaccttcagtcactaactcattagacttctatgaaacttggatcaaggcagtcaaagtaactgtaattttcttggcacaatgtataaaggtgactgtagttttcttggcacaatgtgtaaaggtgatctctattggccttttcaacataagaagagaaatgatgattataatttggttactctggttaatcatttgttgtatactctttggttgcgtcaaatctggcgatctgaacttaaataaggctctcatctattccacatgcactatttcggctgttttacttttaattgtatcatctggtaagtgaagttacaatgctaaacgctgacaaacagtttgtattccattttggacattcgagcgtacgttagctaagttggcaaaagtgtttttgttacaaagtggtatcgtgttggtactaaacggtacgatgtttttacgtggtaaacattttgaatggacaggttgtgaaattgaagcctctgtgctatttattatgggcaatgttctttttctttgcgaaatgggttcgttaaatattcttgaagtttactctaaccatgccagaatgtccaggtgcactcataagaacacgaaactctatcaggaatggtatagcttttattttaggtatgtgtattcaaccaactgtatgaatgattttttacttacccgactaggagggataggaaatgcgatgatggggctagcaaatgcgtttagaggtggcaacgataataataataacattcccttgggggaaatggatgtcgaaggcgaagtttaaattgcattattaaagttgtgctttcgaaagtctctacagctggaaaacctctttacgaaaatcaccaacgcagagaagctgcggcgttttaaaacataagcaccaacattctttaatcatcatctttcactataagtttatggaaaatatgcttaactcattcttccagttaccaaaaattgtcaaactaatgcatcgcttgaaatggttcgcgatgttggataatctggataatatgcattgagattcgaatctcttatttattatatgcgagtctaattatgtgtcttttctaatggaactcaagtcacaaacaataatggtttaaattgtttacgacaacttaaaatcaactaatgaaatcgaaaaactcgttgttccgccttgttaaatttacaaattcattgtcgtttattgcattcatttctccttcatcttgattcttaatgaatcaagcttaattatcatttttctttttgtttaatggttcaattcaaacaaaattaatgtttacaaaataatgaatagcataataatataatgtttgaagagatgaaatgttatagtagcgtgtcagactttactacgctacgatatactgcgttgcgtagcactatatgtcatatgttagaatatacttaaaattagtttattagtaagtgcagtcatttatacaccttatacatatatacacgttgataaaagatattagagggattttaaaaaatagatatacaaccgagcctcgttcccccggttcagttactagctatatcggcgaccgatactaataaactttttataacaataaatatcacattgtttaatttatcatattgcataccacaatattgttgatcgcaagagaaactcaccgcagttctacgcatcggtatgtaagctacgcagtttggtatctgatttaaggatacgtagaactgcggtgagttttccttgtgatctattatattacaatacacaggttgtataagtagcaactgagtataggtattgtattaactgggttataatgttacctatcactaatatagctcataactgaactgaggaacgaggttcagcagtagctctatttatagtattcagataatattgatcttaatagattatcattaagatcaatctccatatcgtatcatacatggtacgatatataattagaacatgtgacatatagtgatacacaacgtagtgtatcatagcgtagtgtagtattgctgacagtaacaaactttaagacgttgtagagcttcgttatttgatctacttaattggaggaccctcaaggttcacggtaaacattgatcccataatctgatgttttgatgtaatgatcgttaacgtaaattggtagtatgagcaaacagcagtatgcttagtattcactgatccgcatttaatacatgttgttaacgatgttattcttttagtatccatgatcgtcaacaatgccttttatgaatttcagaaacttcaatttcatgcctttgttacgtcctttaaatcctgtttataagggagccgaacatttgtgtcgaaaaaatattcataatcaggtgtataacgtagaaaccggtaaaacgattcaaatacttcaagatctagttccccttgttctatacagagcacttcctgatgctattctagatcatcatgttgaattagtcatatttcccaactctttgaatttcccccgaattgaagggttgacgatttacaagtttatttttaagacagcaaggctcttactgtcttcgacgtatggttcctctgcaaagaggccaattgacataattcatcaattgcattcatccatggaaaacaaaaatgttagatatagcatgaagtgtaattggatcgcttcaccaaacgacgagtatacttgggtttttcactttgacattgacaaaaagggtatcatctatagacatatcattgacaatttggagcgcaatcgctctagacagtgtgaaaaaatctctgccttaaaacctgacccaattgaatgaagcttgagaagaggaccatcatatatatatatatatatatatatatatatatatttcaatgcttagttcatctacgataaaatatcatttttaacgaacaccattagttaacacttgctcaggaatgttttccagcatttctaagatatgactaccgaatattccttctcggtacaaaactctatcattatgaatctcttgcatttcgtttccccaaatcttataaaattttactgtttcatcgctgttagcaaccacaacgtattcaccctcttcccaagtattgttagagtacttgcgatgcgtgtgtatcgccatgatcgttctcaaatcctgtccccaaccatcaattgctgcagatggaatatcgaaaacttttgtcagttgaggccatcgatagacaattaaactagagttagtcccttctggagaatagcccaaactatagcaaaactctttatatcttcttgaccaaatgacggaggtaacttgtgcaccacagaacaagctgtggattcggtgccctcgaaacgtgtcgtaaaaataaatttgctgatcattagaacctgtaccaactgccagcaatgatttttgccaaggacaaaaggccagagccttgacagcagccaagtgaatccagtaaaactttttgttctctagcgaatcgatgtcaaaaatgcataccaggttatcgtttccaccacttgcaaactgagtcccatcgtagttccattccaatccgcaaacttgttcttgatggacttttttgatagtgtgaactctacgcatcatgctttttgttcgacggtaaacgtatatgttccctgtactgcctcctactaagagagtccaattgattgggctccaagccatgcagctaatgtctccatcatgatgaaatttataatcgcacctgttattttttgtctttcgattccaaatttccacaaagccgttcactctagcaattgctagaaaacccccgtctgatgagtaagccaaactgcttacctcgtatgtcgtaggactcaattccattatggaaggtccagagatttcactccacaaatacacattttgcgctagggcgactgctaattctccattagttgaccatgccaaaggagaaatataaaagtcatccagtaaaccaggagcgtctaggattcgtaaaggtgtttcatataaacttccttgcatatttgataaatgtccattttcttctacttctattaccaatgaactagaagcaccgtgtatcgtttgtctttggtagtttgtactctctattaaacgagtcgttttttgctttttgttgtctttataatgcaatactcctttgacattcaagtttaatatatcgggtagcagactctcctgggtgttgagcttttcggtaaacgcgttctccataattcggaaagcatccgaatttgcttttgaaggaatgaaacggtctaaaaagttacttttgtataaaatttttttttcttcgttcgaagcctgattacattttctattttgtaattcatttttttttgcggcagtgagttttcttatttttgtgaccctccatagtcttccaggagatttaaatgattctttctttttaattatcatttgttgatttttaactaactattttaatgggattcagctaaaatggttaacaattggtgtggtgtttacgctaaactattttgacgcgtacatttcgcttgtaaacaaagacatagaagtgtgagccaggcttttcacgcgcccgtaatataaaaagtttaaaaatgagttgttgtgaatcaatcctcacataataaagctttgacgtttgttcaattttttctatgagtgacacttgtatgcacttatgcattgaggatcaatatttgtacatccacatctttattcctatttttcatcatatttacctgaacactaatgtccttaacttttaacaaattgtttatcacattggcattgaattctttggattgtcagatatgagttttgccgagaaatcgttatccaatcctgtttcaaatatacaatacacttgaattcacaagctccaatccattttattacgttttattttttttcgcttttcacgaattttagagcatgccatacagaaaaaatctttcgcatcaaaatccaagtgaagcaaacagaataacgtaaaaaattgatcatcaaaaatgagtttaggaatgtttatctcttaaatttctcatattttcatggttaagtttagctttgctgattcaagttaaacaattacagcattctccaacactcatagattttttcggcaaactatgtgaagcttttgagttaaagacaaaaaaaattctaaaatagtacaagattttcaaatggacttttttcttcattttaaaaaaaagcaacttagacttgtaaacgtgaaatgaattagcacctgggcttgcatagtcccttcttatttatctcacgaatgctttaggctattttcaagtcagttcagatatatttataaagaaggatgaattgaatagctgaaatattatgattcgtgtcattttggttaacatagtcaaagtaaatataaaatttcgctttttattagcccaaaatttttcttagaatttaggagcattaggatacgaagcacttattctcctcttatgttttttccttgaatttggttcgtgatttgaaatgtttaagatgctattattattttgttattacagctacgaaagcatcagtattcttttgtaatattaaatgtatattaattgaataatttgaagcgtattgagtcataaaaaatgtacatactccttgcgattcattgatttttctttcacaagcacctacatcttagtctgtactaatatcttcgttcatagaacacgatggtgagcaaatgcccaatcatggttgctaacaagtgtgcgtagcatggaatcttgagggtcaaactatcggaagagcaaaggaagctcaaagccgaaaaagaaagggcaaaaattgaagaatacagaggattggtttcacgtttccaggaagcagtaagagaaaagcattcgaaagagtgatgatcattaactttttaagagaaaaagaaaagactactcagaaggaaacttaaagttaactacggaacttttggattggaatccggaaacttacagtgtttggaattatagacgagaaatactgttgaatgatgtttttcccaaaatgtgagtaaacgttctcttgataaaaaaaattaacaaagaaagctctctaaatgaaaaacaagatcttttggacaacgaacttaagtatgttttgtcaaagatgaaagttttcccgaaagtttactggattttcaaccatcgacgatggtgcttagaaaatgctccttatccaaattggaattacgagatgatgattactgaaaaattactgagtgctgatgctcgcaattgtaagttttaacagtctacctttggcgttctggtcgctttatttgctttctattgatgcagagtactctaattatttataaacttgtcctgtattatatatcaattactaactagcctagttcatggatggcactatcgtcgatatgttgtatctcaaattgaaagggcgggaaattgtagcttggcgaaaaaagaaatggagtacacaactagtgcgattgctaccaattttagtaatttttctgctttgcataatcgcactaaattgatagagaccattttaaatttagaagctgatcccaattctcaaaaagctttggccaaacagatactagagcaaggtacgttaggcctaaatgctgttatttgcagagttttattatgaattcattgttttattaactcaacctgtagagctcgatatgatccatcaagcggtgtttactgatcctgatgactccagtgtgtggatataccatcgttggctaatgggccattgcaatccgaatagcatgactcctttaatctctatgatcactatcgaagagcgtattcagtatttacaaaaggagatagaacttattcaagagttgcatgaaatggagccagaaaatagatgtaagtaaacttgtttacgaatgcagcacgctatattcaccattaacggttggctgctgtacataagactaattaactaatattgtaccagggtgttgtgagtcattggtaaattatgaagccttatgcaaaacactagagaagcaaaagcctacagaagccgacatcaagaggtggacattgctggttgataaaatgattaaagtggatcctcaacgtcgaggtcgctaccgaacattacaagaaaagataaacaacttgaacaaatagtttaaaacccagcaaacctacgtattttttaaggtaccttttatgctattctaaatgattagataccctatccatcatctgtttcattgtgtttttctttggccattagttatccaaaaatagaaggaaacatcagatgggcacattcgacgtagaaatctataacaaaaagtatcgtagaaacaaacacaaaaaaaactaaaaaaggggtgaatagatataaatcagatatagaaatagatataacctatgcaggagcgacactaaaaagaacggaaacactctcaccatgatgaatccgacgaatgcactctgccaaaacaccagaaatgtcaatggtttcaattttactgcaaagactgcgcttatcatcatggggaatggtgttggtgacgataaccttttccaaagcactttcattgataactttaattgctttaccactcaagatgccatgggttacaatggcatacacagccttagcaccgttatctttcaaagtcttggcggccaaaccaagggttccacaagtatcggccatgtcgtctacaagaatggcaagcttatcacgaacgtcacccaccaaaaccatacgagacacctcgttcgctttctgacgctctttgtgaattaatgcaaaatcaaggtctaaacgatccgccaaggcagttgcacgcttagcaccaccggcatccggggatacgatgacagtagggttcacggtggtatcaatgttttcacgaatatatcgtaaaacagaaggttcggcatacaactaaatagtatgttagaatacatataaagacaaatagttctcaaacaacgtcatctttgcactcatacattatcaacgggaacattaaaaaaaccttggatttgagaagcgtgcaaatccatggtaatgatgtgattgcaaccagcggtttggagcatattggcaaccaatcgagcggtaatgggagcacgacttttatcttttttgtcttgtcgagcataggggaaacagggaataatggcggtaatacgacgggcgctcgcagaacgacaagcattaatcataattaaaagttccatcaaatgatcgttaatagaaccacatccagtttgcaaaataaacacatcttcatcacgaacggattcgccaattgtgacggaagtttcacgatttgaatattgaacaacagcaacctttcccaagctaaggccaattctatttacaaatttttagttagttcattaactattcatgaaattcaccaaacgcccatcaattcccagactacaggagcgtttctttcacatttttcaccagctctacgaaaccctcaaattttatcgtagagctaccgaaccaactcataccttctcgcgactttctccgcaagctctggatgagagtttccagcaaaaatcttgatcgaattggatgccatggttgtttttttactgcacaggtgtttgtgaaacgacaagttatcgtttttactaaagtcccacaaggagtcgatagaatacttgtgaagaaatgtacaagaaaaattacctaaagtttattaaaaaagtagtaaaaaaaacaaaaagaagttttttttccacgtttgtgtattttttaaagattttattttttccaccgtctatcttagggcgttcgagcccggtcattatatatgtatcgacctgcagaaaatctgctctaccagctttccaccggaacagccgcggcacccattctcctgggtgtcgaggacaattctccatccaagtaacaacgtctcaataagtaacatggtttgagatgatcagcttggatggaaaatcttacttatacaaacaaaacactaaaaaactaaataaaattaatgggtgctgcacctgcaatcagcatagattcatcaaaggaaactcaactatgcatctaaagaaacaatgagcgcccagtgcgaaaaagttggcaaatgacttatggcatttactacgtagaaagctttatgctcaagctaacatgttcataaacgaaagttaaacaaataaggactgaaaaccaataaagaaaaggaaacaatggtaaatcacaacatgaggcgatctggatggattggagttgggcacgaaaagtaaagttttgttaccgacaattaataagtccaagtttgcttcccctgtaaagtgtaatgaaataaaaggaataaaaatctatttattaaaaagctacaaaaatagatttggctcttttttgttttcatttatcatcgtcatttggagaaagacataacattagaatatttggcaaagcaagcttcttcatgattcatcaagacacaaaggtcattatatttgaaacaattatccaaatttggataataacggtgaatggtaaaatagactgaaaatagtctagcattacgttgggcggagagatagcataaaagaaataacagtaaagaaaaggaaaagataggagaggtgaaatgcaattatcaaattgaaaaaaaatgcttggctttaaaaaaaggtggtgcataacgctcacaccattactgcaatgtataatcgaacattccccctttgcttgtcgctcatattcctgtatttatccactttttgatattatccgagaaaaaagtaaaaaaagcttcattaaggaatctgaaataatagcacctgtttcacttcgttggggtcaaggactccggcacactggctgctaccgtgtgaaaggagtcactaacgctattataggaagcatcgggagaagaagaagagagcggtgatgttggtaaagcttttttggatttttttttgcctgctttccggactggggaagaggcattgataacctgaggacttgatataatatttggacctttttgggtagtattgttggaattattctttttgccttttgaaatagatgaaggatttgtttgcaaattggagtccatttccgaagaaggtaaagatttgtcaattggaggaccgttccaggctttacaaaataaacaaacatatcgtacatcagaagccttttctccataagaagcaagaccattgtgatggaaacaatgggagcaaatgagagcttcacgattgttttcgctattttcgttggcgcctacaagaccttccaaaacccgatcgtaccaatgttgtggatgcatgggatctgaagaagaagaggaagaccctggtacgctttttgcagcagcggcattggaaagcttcttttgtgcaagggttggctgttcaccgtatttttccagcagagcttgggtctcgaaatattcctttctactttttaaagcatctaatatttttcttttttccgcatttaatttatgtaaattcattctagcacgcgacaatcttttttcacaaaaccacgcaattgcccatcgaaacatgtaaagactaaacaaacaaaaattagtgagtgaattcatgccaaagcagtacaatgcctaactataatgtacggcagatgtcaatgcatacctaaaaacacctaagatgtatagagagattcgaaaaagcttagagaataaaggatgttggaacaggatggatgagcgacttgcccaaactgccataccaatcgtatagattgccaaagagcacacagtataccgaaataaaatctttttcttttgactttgaatattatcaatattatactgagcctcttccagcttcatctccaatcgatccaactccccaccaaaatcgaactccttcttctaatcacatgttagtgactttgagcctctaaaaactgagaaatcctcctttacaaaccttttgaaaaaaccagcccatgttaataaattaataacgtctaacctttcaacgactcacttgacaatgaataatttttgcttatggttaggagagtcgcaagtgctcgtttctatgagaagctctatccaaatcacggttttgcatcgtgctatgaaataacgttattaagtattacattatacttgtttgcgaattttatcgagttgtgctatttgaaactatgagcgcaatcgatttgcagcgcggccttaccgagggaatcttacaaagtgacttttggacgaaagttgtgattttgctattttggtcagatgaagtagatttttaattgattttgctagaaaaaaaaaaccattggcttcacattttgaacaacgctcagccttgaatgatggcgactgcaatcataatagagaagtaaatcaacaaatctattccttcaaagggtactaaagcaaaaatgtgaatatttttaaatcaggtataggctttcactgcatattcgctttttttttttttgtttctcttttgtattgcgacaactttagtgaatcgcttgaagtaatattctgatacacttatgggtttgcttctttaaaatacgattctttttgctttttgaaatattttaatatcacaatctattaaattttttaaaattttgatcatttatacgattatgaactttcatgaatcgcaccaaccttcgtattcccgtgttagagattcagcgttcatcaagaaattttcaactttctcttcaaaacagaatggttagtatgcctttttataaaattctacacatcctagtcatttacatgttattgttttagtacatgcttatgcaaacgaaaagaattgcttaaccgacttttgtttaccttattgcacctagccgatagcttaataatctaacgaagcttaaaaatattcgacattaataatttctttggtaaaaattttatttgcatgtgtgcgaatgcgaaatttcaggattatatactaataccaacatgctggaaattctttaaacgctatcgaaaaactaacttaatataaaattttatatccaaataggtcacttaaaatcttgccaaatcggagctttctgtcttacaatagtttaagatattttaattccattcattgaattcgaaaatctattaacattagaaaagaatcgcttacatgccattcttttatattaacaaatcctttacaaaagccagtgtaaatagatgatgattcattgaaactgctgaatacttaacattgcacacgacgctattacgcaacgcgtaaaacaagataatgtgtaagctacgaagtttggtatctgatttaaggatacgtagagctacggtgagttttccttgtgatctattatattacaatacacaggttgtataagtagcaactgagtataggtattgtattaactgggttataatgttacctatcactaatatagctcataactgaactgaggaacgagattcagcagtagctctatttatagtattcagataatattgatcttaatagattatcattaagatcaatctccatatcgtatcatacatggtacgatatataattagaacatgtgacatatagtgatacacaacgtagtgtatcatagcgtagtgtagtattgctgacataatgtatgatttgtgtcgctatcataatttgttggtagattactctcattgtgtgcatatagcaattcatcaaatgcaagtagctttatttgtgtttgataaaaaaaatgccatttgtaatttcacgattatgatgctcatctttcatgctgaatgtattcatcgtggatagcgactctagtactctttgctgcatatcgttacttaaaatactgtatgttaacaatatttctatcaacgaataacaaatttgcgttatgcgatgcaatttactatgtttgctgtccagtcatggcagatatatcatatcgtttacacgtacaatatcactcacacccaagtattggtctttctacagcctactctttgttgtagtttaggaggagactctctctatatatattttttaaaagaacgtgtatctgtatgctacgcttctcatatatttatcaaagaattgtttaagttcatcgctagattctctcaatccaactttcctaccatgttaaccagaagtgtgctgagaaaagcacctcgcgctttttctccctttttacaaaaaagaaatctagctttacatgaatatatttctcatgatattctcagaaagtttggtgtggacgttcctcgtggtgctcctgctcggagcggtgaagaggcagaaaaggttgctcgtgatcttaaagtcacagatttggtagttaaagctcaagttctagcaggcggtcgtggaaagggccaatttgacagtggcctgcgtggaggagtacggcctgtttatgatgctacagaagcgagaatgtttgctgaacaaatgatcggtcataagttaattaccagacaaactggtcctgctggaaagatttgcaatgttgtctatgtttgcgagaggaagtttattcgtaaagagtattacttcgctattttaatggatcgtgagaaccaatgccccatgatagtcgcctccgaccaaggaggtgttgacattgagactgtagcagctgaaaatcctagcgctatcatcaaacgatctcttcccaacagtccaaatcttgaccctcatatcgcagaagaacttgttgacaaactcggcttttcctcttctagcaagccaaaggccgttgacgcaatcgtcaaactttacaaagtattcaatgattgtgatgctacacaagtagagattaatccccttgctgaaactactgatcacaaggtgttgtgcatggatgctaagctgaactttgacgataatgccgaatttcgtcattccaacattttcgttttgcgggacatttctcaagaagatcctgatgaggctagggctgccaaggttgggttgaactttatcaaattggacggtaacattggttgtttggtcaatggtgctggtctcgcaatggccactatggatatcatcaaacttcatggtggtgaacctgctaatttccttgatgtcggtggtaatgctaatgctgaagcaattcgtgaggcattctctctcatcactaatgatcccaaaactactgctatctttgtgaacatttttggaggtattgttcgatgcgacgttattgccaaaggtcttatctcggtagtatcagcgttgaatctgaacatacctattatttgcagacttcaaggaaccaaccaaggtgctgccaaagaggtaatcaacaactcaggtctccgtattttctcatttgatgatcttgatgaagcagctaagaaggcttgtcgtttcagtcgcgttgtcgaaatggcacgtgaagccgatgtgaatgttagcttcgagctacctttgtaggctgctaattttaacggctttaatgtataattgtttacaacccccttttcttattatcattacgacatacggcatcatggaatgattttatataatgacttgtgtatatagaattcttagcacagctgtttaccatgtcttaaagaaatggtttgttatttttcttctttatatattttatacacatttacagttatatagtagcatagttgaacatcgcgatcgtaaactcgtgtatttgatactataccgatcgacgagtgcacttcttaacaatccgacgttttctattttaggggaaatgttaaattgtaatagttctactatgctcttaaattaatgcaattttgaattttgtttccaaaaataaaacaaatgttttctttaatgttcattaatatataaacgttattacatagataattcataactagttttttaaaacgagtagcttgttctcaaatcgagcaacctttcgaatgatcttctgtattcccaaccgatttctgttgtcggctctaattttgcgttggaacaggtgaactagatccttaatagaaatgggaccagctcttaaagccttcattacctctgcctccgtaatcagattagaatctaaaagcacgttaataaattttctggtaaatgtaaaactttagcataccatcaattggaacatttgtagtatctcccacaacctccacttgatctcctacactcgtttctgtagaccccatgctagggaccatacggggaaagtcattggcaaaccgtgataacttttcacttgataagcggagaattatatatccaggtttgttaataagttgttcttgaggccttatttgaatagaagtattaggtgattgtagttgcgatgaagctttgacaggagatacgctgcttggcgttcgttctagtggtcttggtgtattagttttggaagcgttcgcagaaaatctagactttagtttttcttcacgcttttgcaattcttcttcttcttgcaaaacttcttcttcactagacgcatcatgggaggaagcataagggtcctcatcttcctcatcactctcataagctaaattcttttcaagcaattttaagtatctttgcagcttttttccttcacgcgacatttgtctatcattctcctcttcaaggtcgacatcttgatcagcttcaccaaacaaattggcagttagcatttcctttttaatcttgtctttcaacttcttattatcttcttcatttccttccataataggtgcttcttcatcgtcagcgaattcctcgtcataatctagttcatcatcacttccactagctctcggtcccgttacaggacgtgcatttggaaccgtcttaagtttatacatgggtgaagcagagcctgcctctgctaagttttcttcactctcctttttcataaaccagcgaggaatcggagtttttttattcatctaaatgggttagacaagacctgatggaaataaggactgacctttgcctccgcttcatcaattgaaagcgtttggaaattgttacgttgattaaatcgataaaatctatcagttggaatcaccttaaaaccattttcctatagagtaagcataaaaaatcttaaatgatcaaaagatgaatgataaacatccaacatcttcaaatgggataaaaacttacagagaacatgaacaatacatatgcagacgattggccgccttccatcgtactaacccatgtgttttttccttcaaaatcttccataatccaaggagataactcctcctcttgtagtctgcgggcctgtggatcaactttgacgacctggcgagttttccttttaaaggcattctgcttcatgttttgagcgccaccgtaaggagcgattgaagcgatgttcacgttactggagcttccttgttctgcattttgttctccgtttgacgaagatggagcattggggtctctgcgttgcatttttatgggtggcacaaaggatttggaaggatcaatggctttgttagagtgaaattttaataaatggtatttagttgtttttctttcactctctggacaccatgaaagctggaaatccaaaaatttttgctgcgattgtgtcgaagcattattttgggagtcaggctcctcaactttgggtttcttctcatcaggattttcctgctttacattttcaaaaacttttgtctcttgtgaatccatgttctccgataaaatatgtcaatactgatcttccgccggtgttggaaggtagcgagttaagaagcgctcaggtaagaaaatatgcattcagcacatatgtcaaacgccgactatattgctaaaaagtatttacgaaaagatcaagggaaaaagaaaaagaagaaagagaaggattttgtagaaattcaggatgaagatgtcgctggatgggacgatgacaattcattttcactagtcaacagagaactcacatctttgcatgatgcccctacaattgtcgcaaatgaaagccttaaagatcgagatattgatgctatttatcagaatatagaaaaaactactaataaacctgctcagttgtggaaagctgtggggaatgatgaagttgtcgaatctgaacaacaggattctcatgatgctgaatcaattcctcagttcggtctgttaactggaaagcaggtgacctttaaagctgaagaaagaagaaagagagaagagaaatcatccaatcttgatgaggaagagcttcgcaaaagtcgcgaaactgtttacagagatgccacagggagaaggatagatctggttcttgcaagaaaagaagccaaaagaaaattaaaagagaaagaggaagaagctagaagacagaaggaacaacaacaaggtgtggttcaagtgcgtcaacagaaagaatacctaaaagaacttgaaaggcaaaaaacggtgccattggcgcgttatgaggacgatcctgaatacaataaggaattgaaagaaaggtctcgttggaatgacccagctgcttcgtttctcactaataaacctgtatcatcaaaagctacttatcaaggatatgcgcctcccaataggtttaatatacgacctggccatcgttgggatggaattattcgtggtaatggatttgaaaataaatggtttcagcgccaaaatgagagaaaggcacaagaacacgaggcacatatgtgggcaattgaggagtaagtaatcagtttttgaataaatctctaacgaaatcagcatgtaaatatttaacgatttcattatttcttctgctgaaaatggaggagactatttggtttcatgtatatgatattgtaatgcgagttgaacataatctcttctagtttacgagtgtcaaccgaggcacaatacttgattttccagattctgtcccatttcctttaattaactaatggctttgatatttacctacaaaagcaaaacgcttatagcaaatagctttattgggaaatcgcacaccacgagacaatggtagccttatctatactaaaatattttttgctagtttatatatatttatttttaaatttctgacgatttcttaatcctatattcaattatgggtcattaaacgtatgagtatgagcgaccacggctgttagtagtaagagggtttgaaatatcatccattcagttatttctctaaattctgaacactttttaccaatattaaatatcatttccctattgctgtccctaagggcccaaataattcactgctgattctgtgaattcatatgtattggcttttaaatgatagtaagagctaaacgagaacaatcgatgtttgaaaatagtattttaaaatttttaattttatactttttaagccctttcacatccacatagacagacttgacttcacacttgctgtatacgtaaagcaaagctttttgcataagaatttgtaattccaaccgagtacaaggatgattcaaatactctttaacgttttactgttgacctgtttagtatgaaatattgtttttaacaattaaggttcggtgaactcggtgacttcaatttccttagttcaccgagacagattctctcaaacgcattgtgcttgtttacatcttgaccatcgccatgacggttgcgtctgacgattcaccaaaggaagctagaggcataccttttttagatcaaaagtctcgtaaacttgctaatgagttgttggaaccatgtcttccgtttatccagttcaatttgggtgagattgaacaacgcgcaaaacattacttgaacaccgttcctactagtaaggatggtaatacaaaagcgtaagttatttgtatcctattagatatatttgtctaatgaacgatatagccattatttgcttgctggaagcggtattaatgccgaacaaacatggaagaaaattgagtcgctctctctacaagtaagacctcccactactctcgagttgtcctttaccgatgtagatatgtttttgaagtatcatcgagaaaaaaatgttttaaattctttggaagcattggtacaaaacacccaaatagcgttcgatcaatatttggaagaggaatggcgttccaaagctgcaaaaagcagaccctcctttgataatattttacttgaaaataaaaagagagtatccttttatcctttctcggtgcaacgttcgcagaagtttgcttccactttaaaaatgtgtcttgaggaggaagcactgcacggatttcaatcaaagcttgtcagttctttttgtgaggttgcaagagaatttgctcatgatacaaagtctcttctcctttacgaatcctggaagttactttcctctgttatattggataaggattctgtgacagtgtttggcaataaaggcataatctcaaaagcctttgacattgagactgaggatggctcggttaactctcggttctatcaaaggatttctgactgttcccgtaagttccttgaagctcaattttttgaagttttgaataaggaaattgcaaaaaccccccaggctgctttggtaggcggtgttccttcaatacgtaacaaaattcgagcgtatttgaacattcgtctattaaggaacggtgtttggattaatccagatttagaaataatccaagatgttcctatatgggctttcatattctatctattacgatgtggttttttaaaggaagcagtggactttactgaagaaaacagagatctttttgaaaaggtggctgagaaatttcctttttatatcaatgcttatgcgaaggctccgaatggtattttaccaaggcaacttcggagtcaattgttttctgagtttaatcaaaccattcgtctacaggaatcttctgatccttataagtatgcagtatacaaaataattggacgctgcgacctttctaaaacttcgtgtccatcgatttgttctgtcactgaagattacatctggttccagttaattttgtcacgtgaatttactgaaaaaagcgtttccgctcacgaatttttttcattggaagatgttcaacatattttgctttcgtatggctccgattattttactaacaacggatctaatcccgttatgtacttctttttgttaatgctttgtggtctttacgagcgtgccattaattttttatatccttattttccaaccgatgcagtccattttgccattacttgcgcatactacggtctgttgcgcactgcaccttctagctcagttgtcagtaatgaacctggaaagattcaatcaatgctggttgaaacaaaatctgggaagccttcccttgaattcgatcggttgttaatcgattatacccaaacttgtcaagaattaagtcctgtaatgtctgcctgttatcttataccaatgtgcaaaattgataaatatatctcgatgtgtcataaatctctgtgcagtttggtactttctactcgtgattatgttaatcttcttggcgatatacgtggtgatggcgagaggactccttcctttttggagaatcacaggtctttgattggtctttcttctgtaaaagaatacttatcaaaaatcactcttactgctgctaaacaggctgatgatcagggattattatctgatgccattcttttatatcatttagctgaggattacgatgcggcagtaacagttataaatagacggctgggctctgcattgctaaggtttttggaccagtttgtttttcccgataaacttatatctttaactaaaagtatgatggatgtatacaacagaaacccttctttgtatgccaaagtggattacaaaaatcgcgagacgacgaatttgcttttattgactgtggaggcgttcaatgcatataccaataaagactatgaacaagctttatcgtctttacagcagttagaaattttaccccttgacccacttgactcagactgtgaaacttttgttgtgagaaaacttgcaaaagaatttcgatttctcaatgaaaatttattacaaaacgtacctggtattgttttaatagccatgaacagccttaaagaactttatgctaaacaaaaatcttcatcttttggaaatgacgctatatccgtggataagttacgcctatatagacaaaaagcacgaagaattgtcatgtacagtttcctgatagaatatcgtatgccttctcaaattcttgaacagttaaatcgctgcgaaatagaaatgacatgattatttttttaaggttgtttattctatgtttacttgacttcactaaatttttatgcctatacattcattgagtcctaattatccatcattaaaaaagtgttgaatgcactagtcttcatgttaataataatagcaataaagagtgatctttggtttatcgtgctaatttctaaacatctcagagacacttttccatttagtttgtagctgagcatgtttttccttgaggtcatttagctgctttaaagtctttccaagttcctcatcaagatattgtatttgttgaattgaagtagcattgtttttaagaaatttttgattgcgctgcttaaggattgagatttcttgaagaagcctattttccaattcctgaggctgtttctctaattgagctttcagatcagcagaattattttttaaaatttctgtagcctcctccatttcgcttcttgttactcgatggttggaaagtgcttcagaaagtttagtgttttccttattcaacataaccattccctcctctaaattagttatctgagaggttaaataatcattttgatttttaagttcctctaagttattttggcgataggtgttgtgagatacggaggtttcgtgatatgaaagataggatgggaactgagtagtatcgatgtttagagcaagtgaatcttcaacccatgcatttaagtcgacaggagttcttgtgtaaaatgtatacttttggaccagaggctgccgatatgaagctaaaacgtctgagcgtaaatacttaacccactgttcatgagaaaccatatttacaatcttgtcccgatcctttaaaaaaatagcaacaagaagacgcacaaacatttccaagccgtagatagcaattaaatccataaggcggagtgcttcgggtaattgcaacgaatcggcaaagcagcatgctaatgatggatatagtatacacaatgaactaacttttatacgttgtaatgagatagcgacacttggtgccaagtcacccaaacaaccccaaaccaaagcgaaaagactttcgtcaagagaactggattgggatatgaaaaactcacgaattccacctctttgaatgaaacaaactagcgaacggaaggcgtttccttgagccatatacgatagaaaagcacaagttaaccatagcaaaggttcaatgttatactcaacagttgtatcaaacaaagtaaaagcatgcaaaacgtgaaatatagactcagttgaaactttatgccttgtagtagaagaatatttaaaaggctccaaaggtcctctgaaagattgcatacgaataatcttccgaatagaagaatccaaagaattattagtagtacttaaagtagcgtaaagtgttagaagttcattacgttcagcggaaacaagggattgccagaccagttttcgacacggagatggaatacaaaagttattttgtttaattagttctaaaatcggtgtcaagggagggggagaggaggatgtagcattgggattagaaggatcaggcggaaggtcataagcaaaaagaggcacactggcccattgaagccaatcgatattagaaacgggaattgactctttttcacattgttgattaagctcgaaaatgattgattgaatacgtgaatcgttaatggcgctatttaaatcgccgtgagacttgtaggaatcgcgtaattgttcaaattctgtttgattattatttattttggaggatgaaatattggtagatgcagttgacataaaggatggaacaggggaatgaccttgaagaggttgaatgttaggtttttcaacggccaagcgattatcgctttcctggggaggagtgggacgcaacatagaagaatctataaaattaagttcccgatcctgttcttccgtttgctgcaaactaggagatgagtagtctaaactaatttccttcattgagtggtttgaggattccgaagacccaactgagacagcagagccattttgaaggttctcctttaagttttcttgtttcaccaatgtaacgctattaattgcgctagatagggaagcgtttacagatttctggagtatcaagattagttagacacctgaaatgattgaagtagatagatattagcaaaacatacagacataaaaaagagacccttattagtaaaaaatgctaatctgttcaaactaaaattgttttctctcaagcaactggagaggccggtaacccaagtattgtttacaagtgaaataggcttaggaaacacgaattagtaattataaagggaaatgaagatgccctctttatgaattgaaaacgcttttaaaacagatcaaacactttcgtttcgttcagtaaatgtatgtattgtgtgggtggtaggtatctgaaaggatataggcggcatcgattactactttaacaatggcgagccactttccttttcagtagttcccgtcaaataggaagaatttattaggtgattttgtaatacttataattctaggtttattcggtttgtcagttaacttgttacaagcaattgtccaaaatgaatttacaagttaaataagagagagggtgatgaaaattgagattgttaatttctttcaaaaatttaaaatataacttttcttaattggacctgcgtatattctcgtacttgaaaagaagatacagattcgaaacgattaaagacatttacgacatgcaaagcgctcgtgtctaaggattgaaaaattgtgagcattcaaaaccttttcttactatcttaatgaacttattttttactaaatatcgaaaggatcaatgtgtgaaaacatcgtacctttgaacgtgcaaatgggattttaaattatagcactttaaagaacttataaaaattggactctttattttttgattttatagcctattgatttcaatagtgatcatgagaagcgtatacatcttttgaagactacgcattttggaaaaaacatatgcacacatccagtatcaaacaacaacaatatctcaatgtagagtacagtatttattaatcaatattccataatataatccaatttgatgtacttcgttgtgcaaaaagattttttcttttgctttgcaaacggtgacaatagaagtataatatataatcaaacaattatgaataatacaattaccaaggccggattagaagcatgatacttccaaatttgaaactcaagttaaattaaatattatataaggagaagaaaccctcaaattaaaattggcaataatcattttaagcaaccagtacattagtggtatgcacttaaactcgagttccctgtgctatttagttaatgaaaaagaaaatataggtagaaagtacttcgggttaagagcataacgttatgctctttgagtaaactgaattcaaagaggctaatacaatgtttcgggaaacaaaagaacggctatactttcaattgtgataatgctaaaagaacaaaaacatcaataattccttttaactattaaaatataatcctacattaattgaaccaagagttagaaacaaaaaagtcagactgcgatgatcgggattggcttcatcgcttgtctattttagtcatttaatttgaaaaaatagaaaatcattgcctccaatgtttccaagttaggcccttccctaaattcaaagacccgagcatattctcaactcaacaaacgacttaattaagcatacattaatgttttttacacggtaaagaatttggctgacccgtaaaaacttattaaagcatatttttacctttaacagtactttgtactaaaactattctgttggttcaatgcctttaaatgttacggtagaagaggaaacactacaaattgttgaagaagagcctcaacaagaaatcacaaataccatcctagaagaagacttcaatttactagataattcttttcaaacagatatcagttctacttcttctcagaatgactcaaaatttacatgcttgcttgtgaggcacgctgaaagtgaacacaacgttcgtggcataagggcaggagctcgaattgacagtgaattgactgtgcatggttataatcaagcaaaaaaactagccaaatctattcgaaatttggacatcgtttgcgtgtactcttccccccagaaaagggccaagagaacagctgaagaaattacaaaagtggctaactgtcctttgtacatatctgactttttgatggagaaggatctcggatcactagaaggcacttcatttcgatacacagctaattatcgtcctcgtgagcctcccatgaaagtcaccaatcttgaatctcgagattctttacttactcgagcgagaggttttaccgacattttatttaatgaagccattggttttgaaggggaatctggaaaaaccattgtggttgtttcacatgggatatttcttccttttttattacgagcaattttggcacgtgcgcgcacccctttaccttcaatgattattccatggaacaatgcgtcttattgcttgatcactattgatttaggaggaaatagtatcgtgaagatgaattgcaattctcatttgcgtggtatcaaacgaacccgcaagttaggcagctctacatacgactccaaacagaaaccgattacagaattttgtagcaagctaaattaaaaatgtgtgtaactattcacctttaattaaattaagacatcatttgtaacaggtgaaacacaaatctatactcaagtatatcaatgcttttttaattgttgaagtaatcttctgtaataaataaaattgaattcttttaagaaataaacatatatattatacaggcttagacatttagaagaataactcgtgattgactaagtcttcactgagctttgaagtcgcaatagtcctcacctaacaaaatgtaccaaaatattataaacaaggcattaaaataaaacgacaaaaggtaaaacgttagtcctactccgaataagaagaagaagaatcttcataagtaataactttgtcatcttcggcgcttactataccagaatccaacggtagctctgcttcagagttttccaaaaagacaagagatgcttgttcctcatttaaagcctcttcctcatatgcatgcaaagaattgtttttttctaaatcttcaatcacctcctttagagttttttccattaattttgcatcctcgtaaacaattgaatgctcttcattataggtatatgcattattaaacatgagcataaaatctgcaatcagttctccaacatctccataacggtcattcttaatattccttttaatttttccaagagctatgggtcgtttaattattatatagtaatcagggtaaagtttgcggttgggaggataaaggaaaagaccattaacgaatctgccgtcttcactttgaagattatacagcctttcaaagatttccatacaatatcttctaagtgccttctgcttatatgaaggtgtattttttcgaccacttctggccaaactggattcttgtgataaaggggttgatagactagagcctgagtttgttttttttctcggtcgacctcttttacgcggcattagagtggaagatggatcgtcaactgtatttaattcgtcgagggttaattccgtataactgatagaattacgacgacgtcgctttctttcgagatactgatcctccaactcactagagctttgaactgcaaaactgtcaacctcgactttataaaagtcaggaagttcatttacagtaagtaaacgttccagcggtttacctttaccatatatatcggtagctgcacgttctttatctaattttttaaaaagtacgagctcttcatctgttctagaaatcaactcgttcaactcatcatcttgaagttcgccgtaagttaagtcatgatcatcgtcgccatcatgttcaagtaaagaacgtaaaaaagcttcacgctcctcaggtgtagacttgttgtcaaacttaccagcttggataacttttccatcaaggtcaagcttatactgagctcgagaaagaatgttctcttcaatagacttttccgtgatcaaacggagaattcgcacctctttggtctgcccgatacgatgagcacgatcttgagcttgcaaatcctgatggggattccaatcggtatcaaaaattatgacagtgtcagcagtttgtaagttgagacccaacccaccagcacgagtactaagcatgaaaatgtaaacatctgactttggatcgttgaactgtgcaagaagggagcatcgatcgtcagattttgttgaaccatctaaacgaagatatttccaattctttgatcgcaaataatcctccattatagtcatgatctgagtcatttgaaagaacataagggttttatgacctgttaaaaacagctttggaagaatacgatctaacagctcaaacttgccagcagctctccaaagcaagtcgacgttagttccggatggatcgatggctctttcaacatcttcaaatatgaacggatgattgcatatcttcttaagttgcataaccgtgttctgtagtcctttaatacccgtttttcctttctcaccatccacaaaaagcataccatgcttcttcatttgttggtacaattttaattgcaagcctgaaagagggcacttgatgactttctcaaccttgtcgggtagctccttttcgacgtcttttttaagtcttcggaacaaaaatggtcgaaggactttatgcaaacgttttataataagtaaagcttcttcttcattaagccctattttatcttgtccaccagtattagcaaaaggtgtattgaaccattcatcaaaacttttaattgaattgaagatttttggtaagacaaagttaagaagagcccaaagctctggtaggttattttgcaaaggtgtaccagtcaaaatgagacgatactgggaatgataataagtagataaagtactcgttaactttgattgggtattttttatacggtgcccttcatctataatcatgtgaacccatttaatccgagaaagtaaaggacgatccttaatgatatattcaaatgtggtgagcaagacgttgaaattgctagatcggatttgggattgtaatgtttttctcaattgcggagggcctttataagctattttcttaacactgggagcccatttttcgaattccataatccaatttgttagagtagacaatggtactataataagaaatggtccttgctgattttttttctcaatcaaatatgtgataaacgcaatagtttggattgttttacccaaacccatctcgtcagccaggatcccattgaggttgttattgtatagcgacaacatccattcaagacccttcaattgatagtcttttagagtgccaccaacaaaaatctttggctgctcaacctcttcatgaatacggtgagccactttaaaataatcaagattcttatcttcctcactaattggggcttctaattcggcagaattgctaccttttccagaagtatttccactgtgaatattggattgttgaatccggacggcacgtgtaagattttccaaatactgatcagtttgttttaaaagatgagtgatacgagtatctttcgccttgtctagtaactgcaaatatgcggcttcgtcatcagcacggagagcctgtaatctttgacgagcactacgttcgattcgttttttctcttccttttctagatgggcatgaaaatttataatatccttgcatcgctgagttttagctttattctgcttgtccacttttgtcacaattgactttctgtgcagcatgatagaccttaggtgagttagaagcttttctttttgtctcatggcatgttcggttttttgtttctcagcaagggctaaaactaaattggcttcttgcatcgtttgccgtttcacgtttcgaaacataagtcttaaatttcctgcagccaaactatccgagtgaggaatgactgaatttattgtctcgcgtagagatcgttgtttttctaataaacgcagacaacgcaactcaatcattgattttgacttgtcttgttgcaatatttttttgttcaccgactttggcctgttctccttttctagaaaatcaattctgttagcaattgaacaagcaattgcaatctcagaagagagaaaaacatcatcccatgatatactaggaggcaagagtgatgggatgagcgataggttttccgaagaggaaaacttactgaagggaataggcgttttaacataagttcttggatctacgcaagaagagtagttgacgtttgtgggaaactgtgctcttttagcaacctcggtttttccagtcgactgttgtaacggcataggtgaaactgatggttttgcaagagactcattcttgacaggaatcgtagcagaataggctcgtctttgaaattgatttggaatattctgaatgtagggtgccttagaggtacgcatgtttgcatctcttgtaggagtatccttctttacagacgacatttgaggaacgttttgctgaaatggcattgaaggagaaacttcattcgaagctccatagaccctgccaaatatggcttgttgcacagcaggagggacttgtccatttggggaattcaaacagttatatgcaactatctgacttttcagcatagcaagttgagcatgattaagtttggaagtaggaggcacttttgcagaaggtacgtgagattgtgtttttaaagctgatgcggagggtgagggagacattcgaggtatatgctgcgcagacttcacagtatttggatctactgaaggtgatcgagatgaagaaggttgaaaagaagttgcagaaggcggtaggttatttctatatacatatggtgccggggaattagaagaagattgaaagtatgttttagcattaatagcatcaaggttagagggctgaggatagggaaaatgcgaaccggctgcaccaacgtctacagtagccgtagagttaaaaggagtatttggatttgcggaagaagggagcttcgaatgagcaaaggaagcagcatcattctgatacccgttgtatggagaagccaacatagaaccagacggaggggaagaagctgagaaagttgatgggtttacaggtatcgagcctcttcggcccatttgctgctgcatcgagacattagcaggtatattcctagcactaaagctgtgagaacttgatgttgtatcaactgacggagctctcgattgaactgtatgtggttgttcaaatgtggacgaaggggaggcaaaggaatgaggaagagaggaattgacagtagtgtcgttagcaggtggataaggtgtggtaggaggaaaagagttattcatacgagaaccatttttcatcatggatgccatatcataagcattatgataagtgggattggaggtgttttgttgggatagttggttcgcatacactttcaaattattactattcgcattcgtatttgtatgtggatgaaccatactaggtgcaggaggtactgaagtatccctttgtaaaggagcattcataatgtttggcgatgcttgactattcatgtaggaaggattgtttaatccgacatttccattgccagggttaggaggggttggtccattagaagcaggcctaccaggaagagtttgcataccagcttttccttctgggagattgttaaatcctgtagtaggaagagtatcctgctgctttcgaagattggtgttctcagcatcaggaaattcagaagattggttccgcatctgctgcatacgggcataatgagctctttgaaccatccttaaaatggaactaatttgagcaaactcggggttattttcctccgtagcaccttggtttctcattacctgccattgttgataaagagattgtatattatccttggtcaaccctttcggaaatttctgattcccttgaacagcaaacatcggagaaatgtgttttagtaaatcgcaaatcaatattacaacaacaatgaccgaaaaccctcaacgtacaaatggataatttggtgcacttaaaaaacaacgagagaaaaagtttaataaagattactttaaaagaaaaaacaaatccctttaaaaaaaaatttcaattgagtaactttgacctttaagaaagagatcgcgtctttcaacaaagtattaaaatttaaagcgttaaagtatagagtgaaaaaagaaaccagaaggacccagctttagaaaatatacagtgtagaaagaaaagaactttttaaataaacatataggcttcaattgaataaataatagaggaaaaaggggaaatgtgggtctacgagattgaagatggcggttggtggcaggaagaatagaaaacaaaagcagcacacggtagtgagaagcaacgaaaagagtctgcaacctcaatcaatttgcaaacacagcagagtaaaagattaaaaagcatggtttgattaaaaaaagtacaatcaccctagtgaagcaaaacttgaagggaaaccgaaggccagctcatccttaaaaaaaaaaaaaaacccctccagtttaatttgacgatttatggatcataattacgttgcgttatatagtaataacgtcaacttttttttttcggaaaagattagcattgcgaaataaaaaataggatgctaaataaactagcaaactatgtgttagattgcataaacgaagatataatgagagatgcaaagcgtactcaaattcgtttaccattgtagtgtacagacactgtttcgcggtgagctagcattcttcaattcaatccaccacatatccgatatatacgaaatgaatgaaacagtgaatcaatgcaaatgtgaatgatcaagatagaaggtacattttttcttgaatgtagagaaaaatgtggggaaggtgtatttgctaaaaagtggatgagtgagtttcagagctttcgttcgttgaacgaagcaagccaaaaaaaataaaaaaaagactccaaagaaaatacgaggggaatgcaagcatttaaaggaataaatacttgcgaatgcggaaatcgacttattctcggtataaacagacgacggcactaatggggttcccctgaaaataagaaggttaaagaccacaatataccatcggcttggcagtcaacaaaacatccttgaaattttcaaacttgaaaactaataaaagaggaaattaattagaatcgtatagattaggataagctgataaaatgtatcttatagaatatatgacaattactcattaacagtaattgtagagaacttggctatcataatgcttttccatacaatttgttttaaaaaagtgaaagggaaaggattggaaaatacaggtaatgaaataaatatatcagtacgatagacgaggcagggaacattaaatcatttgcattgattttccaaattttgaatggtgcaataactaatcggattgggaactcggcgtaaagtggtaaaccagtaagtgagaaagatgtctggatccgcaaattttgtaatctgtcaaaggaagaagtggacccttttagaatgtgcagtctaatgaaaatcatgatttcctacttaacataagagagtatatctttcccatgaaaaatgattcaaagagaccacttgcaaaacttaccaacccaaaagcaatttcaggtctggttttagtagcagtatatattggttaaaaggttttgaaaggaagatgtatttgtatttcctgaatcatatgcatggattcattaagacatgcatactatcaaggaggaaaaaggatgctgtaagacataattaactatgggtcactatcgtaatgggatagatggttttcggggattaaaagcatgtaattaattttcctactctgctgataatcaattcccaataccatatatgaatttcgaaatcctttggtttactttcaatcatctgcctaacttaacatcgaaaattcggatctcatcaaccgcaattaacttctgctaccttttttgcccatctgtccaacctgcctaaatgtattttttttttatttgcctaattgcgttctctatatacactcgctatatgctctactgtagtaggtccacgtacgctattaattaagtttccacacttgcttgcaattgaataggttatttctcagcacacaactcacaaatcctcgttatatattgctacgtactccgtagatttgcttaaaccatggtttaactagagtgaattctgtggcatagaatgaacgataaatgtagtttagtgttttttccacataatccttcatactctgcattcaaccagatgaaagtaaagaacaggagcgagtgatataagcgggatcatcgcaaaaatatataccgtacagatttaataatttctattatgtctgtcagctatgcaactcggtatctgctttaacgttacgtaaaagagcgacgagcttcattgcgatctactatatgatggcatgcaatatataattgtaacagatgaggtaattattgttatatgaaagtgtcactataactcatgtttgtaatagctcatacctgaagtaaggaatgagattcagttgaaattttatgtagctccagatataacacatatcctactatagatattaacaaatctatctcatgaaatcttattcacttgtgaagctatatgcaattaaaacggatgacatataatggtaggcaacgcagtgtatagccttgtattgcagtatcgttgaccgaagccagcgaaattgtcagcaatactacactacgttatgctacattacgttgcgtatcactatatgtcatatgttggaatactagctaagatccgtttattgataatcacgggtaactatccgtctatatacatagatacccgttgataacaactatttagaaatattataaatagcgttacaactgaactgaggaacgaggttcagttatgagctatattagtgataggtaacattataacctagttaatacaatacctatactctgttgctacttatacaacctgtgtattgtaatataatagaccacaaggaaaactcaccgcagttctacgtatccttaaatcagataccaaactgcgtagcttacagaaatctagtagctccgtaggatgaattaagtaactttctgagtgtcaaacactgcagtaaacatctatactgatttatggcggacttcttaatgatacataaggaaagctaacttgagtgaataaaaagggcagtgacaaaataaatgtgtcagaggcaattacattaaaatgggttttggaattctacttttcacttgctattattaaaaaagcggttttctttgaaacgagtattgctcatttatttacgttgaacggcgggaactgaactccagagtgaatattcttgattttgctgtttcgtttgtcgcaatcacagcaattaattcgcgcatgtattttattaaataaggaatgatattattattatgaagaataattacgcttccttggaaagttctatagatgaagaagatgaattgaagacaggacatgaaattgatttggaaaaaggcctacttccagaatataattcggatgaagagagcacactacctccatattcaggtaagaattgtagataataagaaaggaattactcaattgaaagttgaaacttgccatcgtgtcaaattgcatgctttggtcattgtttacaatcggccatgcaatgcacacattttaaaacatgttctttctttactaaagtatttcaatcatattaagttaaacagatcacgcacgtgtaagcaatcctcctaacacacatagagaaaaccattcttccgggacggcagataattcttctacctctccgttgaaaaaagaatttttatcattcatttcaatctttgtgctaaacgtacccgcaatttgttatctaacgtataaggacgctctctttaaagattatggcaaagatgaatgggtatattttggagtgtggtgtgctatttgcctgatgatttttatttctttatggtgtaagtgacacgataggtcaattcttacgttcattcactaactcattaggcttctttgaaacttggaccaggcagtggcacaatgtgtcaaggtaactgcggtcggcttgtacaactcaagggaaaaatgggttgtaataatctggttattatgggtagtcatttgttttgtactctttggttgcgtcaaattcggtaatgtgaacttagacaagactctcatctgttctacatgcagtatttcagctgctttacttttatttttattatatggtatgtgaagttatgtagttaccattactgaccgctaacacgcagttcgtcttccattctggacacttaagcatatgttttctgggttttttcaagttctaggtgtacaaagttgtgtcgttattgtaacgaaaggtttgatgcatttatttgacaaacatatcgacgggacaggctacgaaattgtagcctcttcactctttgttataggcaattttcttttcttttacgaaatgggtttgtttaatattcctgtaatttattctaatcgtatcagaatgtccaggtgctctcaaaaggatgcccaaatttatcaggaatggtatagcttttatattaggtatgtgtattcaaccaactgtatgaatgattctttacttacccgattagaaggtgcagggagagcgattagaggtgccaacgataataatgacattcccttgggggaaatggaagttgaaagcgaagtctaattgcgttattaatgtagttgtcgctccagttggaaaacctctttaccaaaattaccaacgcagagaagctgcggcttttttaaaaataagcaccaattttctttaatcatcctctttcactataaggttatggaatatatgcttaacttattctttcaattaccaaaaattgccaaccaatgtattctacgatgttggataaagtgcattgaggaccgagtctttatttattatgtatgcgagtctaattatttgtcttttttaatggaactcaagtcacaaacaataatgatttaaattgtttacgacaacttaaaatcaactaatgaaatcgaaaaactcgttgttccgccttgttaaattcacaatttcattgtcgttattacgttcatttctccttcatcttgattcttaatgaatcaagcttaattatcattttttctttttgtttaatggttcaattcaaacaaaattaatgtttacaaaataatgaatagcataataaaatattgtgattcagaacgatggtttgttatagtaataacctaaagacacattgcaatagtgaatatctaataacgcagtaaacgtatatactggttttatgttgagtttcctaatgatgcataagctgagtgggcgatatgactttgattgacacatattttgtggaaattttcaatatataaatcaaagagactaatgatttatattctaatacttttatccacatcgaaagcaacagttcataacctaactgttgggtcaactgatagaataaaaaaaactcgggtgttcgtcccaattataattatcactacagttatagtctaaatatctattaacttcaataactgatttttaacgagtattatattctttcctttttttcaaggtataacgattaattcttcattgtttcaatattaataagaagctactagttaaagcaagctggtattatcgttatgttactaccaaaaaaggaataccgtgctgttacattttgttataaaaatataccgttaatcactatttcccaaattacagatatcgtactttacttggtatttcctctatttactctttctcgctgtgcaataagaagaaaaaattttattatctgtttacaaaacatagctaaattttctaaattaacttttgttattgattgttagtttatggtggattgttgttaattgaattaagatccaaagcgcttgcttgttcacattcgtgtgaattgcacttttaaaaaaaaaaaggaaaacttagttatttatttaataagcttctaccataatggtcaagcgtcaacgtattgagagctcaaatggtaagtgtcttagttagtcttaagtattggctctcttatatcttttctaggataatattctaacagttctatgacagttccactcagtgcattcgctgtgcgtcaattgactttaagtaaagcagccagaaagaaagacaattcatcggggaaaaagcgcagcgtttcggaagaagaaagccaagacaaatatgaagacgaaatgaaaactgaaggcgaatttccttcttacaagcacacgctcgtacaagtggttgtcccaggagttgatcatagaacaaagctccattcagagtcatccaagaatgattctgaaataactcctgatataaataggtccaaggttaatcctcaggaatactctgaattctcagttgctagtcctcaaacgatttctccgagtttacctttaaacttggacgacgaaaccgtaagtgaaaacgttccacatagcccacaatcgtctaacgatgccattccggtgattaaaattacggaagaaaattcattcagggttaaagatacgctatacgttggattacataaagatcaaaaattagcaatggttggtaccttcatttttcgtagcgttagagggaagtttcagctctttggtgcaacctattcttcagcttgtatgtcttggtttcctttaaatgctccgttagcatttgcgacaccagtattttctgctatagacaatgcattacctgctatgcagatttccgaatatgaagaagattcccttaaccttcgttcctttgcagttccctcttactcaccaaaagagcatgaatatgaattagagcccaaagatattctcccaaattttgaaactgtaatagcttttagagaaaatgaaaatggtctctctaagatagctcgtgtccttccatttgcaaagcgtttgttttcttttaagaatcttttgcaagatgcctcatcaatatcaaataattttgagataactccggagtcttggtgttctttttctaaccagttactgttttccacttccaagtcagactatgttgttcctcgtcttatggtttgtggacctaaaggatccggtaaaagcagtttttcacgatacatcaccaataggcttttacagcagtatcgtcacattgcatatcttgacctcgaccctggtcaacccgaagtcgtaccttctgggcacatttcattatattatattaactcaccattgcaaggacctgttttcgcccgaatgctctttcctacttacatgttacgtttgcatctcggagatataagtccccagaaagatccggatcattacattgcttgtgttactcgtctttttgctgaatataaagattatatttttaatcaagagatatcccaaaaggagattattcctttgataataaattgtccaggttggatcagagggggtggtgctgagcttctttcttctattgttgatatatgtcaaccaacagaagttgtatacatgagtcgtgaagacatgaaatcaagtcatcgtgaaaaaaagagtatttaccagcacaaagaatatatgcctgattttctttcaagcagagatgagtttcaacttaccctcttggaatcaacttggcagtatctgcctgatcccaacgttaacaaggttacctctgctgataatcgtatgttaggcttactttcctatctgtatttcaattgcaatttacagaggtgggactttacgacaagtttgacagcttgtcaacctatagccacagcttttaagggatcttctaagggaatagatgctgttaatattataggtgaacctcttaatgttaatgatgtcgcgaaaactattaatggtactttaatggcactttatgcctgcgacactgcctctttagataacagtaacacacaacggattgttagtagtcctgaagggataccattaatcatcaatgatggacttcctttggatcccaatacgtctcattgcctaggtttaatcgtgctacgcactattgatctcaaacgtaacgaatttcattttgttggtcctcttaatcttgagcttattaaagatgcctatgcaaagagcttgaaaattgtccttgaaagaggaaggttagagcttccagtgtacgcaatgttggatcaccgtttagcacaatactcggaattgccatacctcgatcgaaatcacgatcgggtggctgttggcgctcatcgtaggcgcgttcgccgtaacattatccgtcgtagtactttcgttggatgatacccaaatcttatgttttacgaatttctgaagacggctacgctttttgcatacctgctagaaattattttgggcagctgaatacaaactatatgaaatatactttttcttatttttttttggcggttaaaaaggacaatagtgaaatttatttatatttattgtttcttaagaaaaaatcgtgatttgaatttgttttagattactccaatgcaagtacaatttacgttcttcggcgaactggtctgggaacattgagtactatgcttattgcgagactgcatatcgatggttaagctccgatggtcttttgttggcagcaaaagttatgcattaggatactttcatacttactgccatatcactggtatgttgagtttttctacactgtatatgcaaatttataaggcatttgaattttcactatgtttaagaatctactttggtaatttagcatattctgactaacggtttgaagcttggtttcgatattccggattaccgattgactattttaattaacttttagagatggttttgctgttgagtttttttgattttattcagagtacattttcaatggttgtgtatctgtatgtaatcattcaacttttcaattttcctttctctaaaggtgaggaaaattggctatttttttccacgttttgaaagtgccataacatttgaagtatagtatttgctttttcgtataaatcccttcgaaggattcagctatgcaagtgcactgttctagcaattggggaatgtgattgtgtggttttctttttttgatactgaaattctctcgtattacttgatttcccaaaaaccaatagactatacgaacgacttgttgaaagcagcgacacgtatgtttgtatattaaataccattgataatgagtcaagctgtttgaagatgttgtcagtaacttttctttaatgtacacataatcatataacagttgctttgcttcatcttgaatttttgagctcttgtaagttgaagaacgctcaaggtttgatgattcctttacataatgcaaattggcatattccatgtttatgatgctttgcagacagtcgaccattctacaataaattcgatacgtcgccgaacgtacgcatcgtttgagagatttgtagcgcctgtttttgggcctgaatagtcttttcgctataaaattgtgcatttaaaatggaatcgagcggctgttaagagtgttgttttaaaatttaaaatataaaagaatgtttaattggtaatattaccaaagcaatatatcaattagtaccttgactgatttattattgcagatgttttatatcttcgtttggtagtgttgaagtttacgtgactaaagaagttgttggtaaatagttaagtgtaaacaatgaagtgaatagtatgcatgtgagtattactagttttttattttcataaaagctaaacagtaaatctattaatcattcatatacttaatgactttaattgaatccccaaagtcgttatgatgaacctaaaatttgtcagttcagttaaaaaagttgtttcaagttttttataattgaaagtaacaacaataaaaagataaaggttattgatattcaattaagtcgataatttctaaatctcctactgcaatcataattgctagaagtacgccttattaacacatactatggaaactaagagtgagcattataaattcgatatgactcttcttcatatttgctattgtatcttgtagcaatgagagagacatatagttagtggatgattttctaaaaaataagctcagagaactaaagtaaatggttatagaacaaaaaggaaagaaaccaataaatatataatcaacaacccaacgcaatgacttagtctgaaatttttccaaaactacttaaaaagctaaaaatgtattcaatttgaatacgaattcgataagtcgttaagacataaacttcgtacatcgtatatttattatatgctaaattaaaaaagctgaacaatgaattgaatgtcattaaaaaagtcattaaccacatgcaagtctaaaaaagcgggatcaccaaaaattttgtaacaattcaccgattcaactagtacagtatcaaataaattagcgacgataaagaatctatgcatgcataaaaccagggttggactgtagaagcaaaatcaaatcttgtgagccaaaaaaaaagctgactatgctttcaagtcaattccccctattaaattttttatttggacaaacaaaaatcataaaaatgaataaacactatttttctaaagagaaaaatagattataccccaaatcccttcaagaaatcaatcaaaatcttaaataagctagtcgaggagaaatagttaaaataaaatttgatcgaaatctttagtaatggaaatattataaataccatagataaaaagcgttttatgactgagtacccatatcatcgtttagcaagctagctcgaaacattatagaagcatcagattcatcatcgagtataattgtgtcatcggcatcaaagggaatgtcaaaaagccatcgatcttcaacacgagattttggtttactcaaccgatgtactggcaatgcacgagtgcgatccaacatcaaacgccctccacgtcctattcgttgtcgaacgcagatgggatttctgggatgtaataaagtgctatagccgtataaagagttatttgaagagaatgaaagtgaatcgcacgtattaaaattagatagggaagagtgaggtgtagagtaggtgggtccattatcagataatggagtcgaaggggttgaggaaggaatactcagttgattatgggattgtttcgtttcttttcctgaataatatggaataatgtttcggtaaaacgaatcgggataattagtatgaataacggtactaggcgtctccaaaaggtcaacccaattacgatcgagctgttccttcttggtaagacgttgctgaagacgaatctgaaattgtgtaatttgggctgattgaacatcatcaagcattaataacggtcgaacttcgacatttcgcgtaggttgtgggcgataggaagcagggtgaggagaagtttttacaggtggagctggagtaggtacaggggcggcgggctttacctcaataggacgtcgtttaggattgattaaaagttcatcactgtcttttatatttagagtacgtttaagctttttgacaagacagcgcttctggaaaatagcatagtcgtcttcaagcgcttgcagcttcttttgctcacgtttgtacacttgttccagtaactgaagacttgtctccatgctttgtcgtaacctccgtaagcgatcataagactgagcgtccgaccgacgagttttgcgagcctgtcgaatttcacgacgacgaaaacaaacatatggatcatcatcatccttatcatcgccaacttgtgctttagccataattggaagaccacccttactgatacgacgctcacgccaataagggtatacttgactagctagtggtttcaagtacagtacatcttttaactcgaaggaggtgatgagctcagacaaaggcaatatttgagaggtatccatgctcaaaaaaggctgattttgattaatttcctcttcaaacgtctgcatgacaatttcaaaatctaattcagaaaatttggaaagagaaggttgagcctgtttcaacttcagaaaatattccgtatcatgttcatccatgcaatattctgggtttgtacattcttccacagtgagagaaaaccgaattaatgtcttaggaagaatgaaattctttttgtaatatttgtcaattatacctatatttttagcctcccgtgtagggataataagctttttttcagatccacgcacaatggcctcatgggcttcattgatgacttgttgcaaatgtttttcctataaattgttagaaatctaagtaatcgaagatgaatgaaaagcgataagaaaaaggacagctgtattccaaaaacaataaataatcaaataaataagcattgctagaaacataacccaaaacattcattagccacaataatgaagtagcaatcttttctcagtaaaatcaaatttagaataaaaactaaaaaggttcaatgaatccgttgaaaaaaaaaaaaaaacctcaaaattcgtgaaagaaggagcatcaatatttttcaagtaacttttaattctcagtttactaatctttacaagagtaactttaacacaaacaaactagcaagtttaaaaaattcagaaattcgatgcaactccgctcaaatcataattttccgcataacccttcgtatacattgtaaaacggtgattaagcacctttaaaaagagtgtttatttttgtcaacgaaatccatcaagaagccaaggtttttcgtacttttcattatctttcacattctcgggttcgcacttacctcttcctcttctttttcaacaccagattccaccaagggaactgtccgctgaagtgaagcttcttcatcaaagtcaggtatatcacgttcgaaataaatcggcataacggttttaataccgaccttccgttgacgatatgccctagcatttttggagacggaactcatgataatattggtatcgttggactccaatcacttaaatctatccaaccgtaaaattataagatactcgtctcactcaaaatcttgtagaaacaggcgctaaatcctggcgtagttgacggccgtcgtcgttggtgtgtcaaaccactaggggttaacaaaccgaatgaaatttttcataaacctcttcactgcgataatttaccgaggagcaacgtaaccaaaaataattttctaatacgctcgtaccgttaatatacaacgtattgtagcgatatttactggagattccaggtgtaaacaatggaagaaaccgatggcaggagaaacaaaagaggaaattgtcaaccatcagttgaagtgaagtccataaaactccatagtgaattataaggaatcaagttctatcatagttcatcttattgacgtcggaaaaccctcgtcaatactcaatagaaaaaaagcattactaattcaaaagaaaagtcatgatctgctagtattcgtagtctctagtagcagaaaaaagcacttgatttttactttcaatgcgtgttatagaccatgaataggcatttctgttagaataataaactgttcgcagcagagccaggtggaacatagaagtaaacagcggaataaattctacatttttttccactaacgaagatgttttccgtatctcatcaattatctatgccaactgcgcatagtatagggtgagaaaaatgaatgtctttttcaaaacgaagcaagttgtagacaaacattttcaacgttccacatttgctttttccagaaaccaagcccttttcaggaagattaaaatttgatttaaaaacatgaattgcaatctttcaaatattcgaaagtcctttcaaatacttaccaaacatgtcgaaaaattgctcattctcagattttgcttccttcataatcttaagctcatatggtaaagcttaatcagcataaaactgctaaagcagtttaaaaaaaatttggtcatcagaaagaataaaggttaaaggtatttagttttgaaaaattacaaaacctcgcctttaaaaatccaagatgcagaaacagccatctccaaagcaattatgaattgctctaaacctcaattctttgtcgtttttaagccggattttcgtttgatgcatcctttctaaaaatgaaaagctgccattgcagttgaattttcaattacaagcttacagataattttcatagctatttttttgcacaacccaacatgttttcaagtcattttttgaaatttacggattccacgattatctttgagattggtggaagacaaagtgtgccaagtgacattcgacccttacattcagaaggattttgactcaaactaccaccaccgatataaggaattttctttgaaaggtagctgaccgttatattcttggtttgttaattgaaccttactcatttcatattattgtgtttccctctcatgggtcagtcgcagtcgcaaatctttgaggacttgatctcaaattcatcctgtaagtttgatgcttagtacgtgtggccaaaagtgttcttatcattatattttttcatgttagaatacttacatctcttgtcgtctatttctttttaagattatagccaattcatcaaagttgccggtttcacatgcacaatgcaaaagtattagcacctcaaagcgactcggctaacgttcattgtatctagtttccaatgaggagatagaaagaattcgcaagcgttttattaaaatagatgctaaccaatctggctctattgaccgaaacgaatttttgtcgattcccagtgtagcttctaacccacttgcttccagactgttttcagttgtagacgaagacggtggaggagatgtggactttcaagaatttattaatagcctttctgtattttcagtgcatggcaataaagaggaaaagctgaagtgtaagctcaatcaacttgtcgttcctttgcaaattatgttctaacattattgttttatctagttgccttcaagatttatgatattgaccgtgatggttatatttcaaacggagaactttatctagttctgaaaatgatggttggcacgaatcttcgggaagatcaattgcagcaggtatgttatagacaaaacctcttatctcaaaatctgactcctattataactagattgttgacaaaaccattatggaagttgataaggatcgcgatggaaaaattagctttgaagagttcaaagatattgtcagcggttccaacgttactagtagcatgacactcgattctttttgatgagcatacttaaaattaaaactgatccttgtttcctcccttctttcgttttgtcgaacgcaattacgagtttgactaaagattccttttacacattttgttttatcgtcttcattccttgcatctgtatttcgaattttataaatgcatactattacatttcttttcctacttgctatttttacaatgcttaatctaccaaaaaaagtttgtatgaattgcgtatcgaatttttactataacctgtcatacaaaaatcttgaacacataacttagattattatgcttctttagcaatactataattctcagtcaaagttgtttacagaatagagtaaacgtcttaaatatttacaaattcaaggcgttgtaaagtataaacattgaacagatgttcacttacaacagtaagaaacccattttaaaaatactacgttgaaaaattgatgatgagatcgaacaataaagatcatttacaaagacgatacagtatgcattttaaataataaataattaattattttcatatatagtttttaaagtcattagattaagaactttcatttgagctcttctcatcgataagcgattttaaatcgccaagacattaccaaataattacaatagcatgcaactcaacggcaatttcgttgcaaatgcatcaactgcattatctttgttaacgtaaagaaaaaggttaggaatggattagaaggaacctcaaagacttaaaaaaagaggaatgaaatcttggctctgtgtccccaagatccttttccaaattccggcatatctaaacaatgtcaggaatcataaaacccaaaatatatgttgtcatcctaacaagtcaactataaaagaattgaaagaaggtcataaatgcaatgagggcatagataggaaaagattactcaatttaaaaggcttctgcagcagtcttttgagcaggcgtaagttcggtaggaaatttaaccttgcactcaatgatcatattaccacgttgagaaggattctttggcaagggcataccgaatccaggatacgtaatttcataaccaggttgagttggtaaagacgaagatactttaagcttctttccatcaatagttgaaatttgctttgaaaagcccagaagtgcttccttcaaggatagctctacttgcatacggagatcatcaccagagcgtgtgaaaacaggatgaggtttttcagctagcacgaactgaatgtcttgaacagttccgtccggtttctcatcaccctcaccagcaaacttgattttagtgccagctttccatccaggctttactttgatctccaaaattcggtccgctttcaccgattgaccagaagcatcaattatgtgtctagatattttcatcttcttggtacatccggtaaatagatcctccaggctcacgttaaggggtcgagtgataacctcgttttgagcggggggttgactaggacgggatccaccaaaagatggatggctacgtctggcgtgaggacctgctccaccaccgccaaacatattagcgaatccgccaggcataccacctccacgagtccgcgtaccaaaacctccatccatgtccatatcatcgtccataccacccattccacccattcctccgcccatgcctccaccgccagcaaaggcatgaccaaatactctttcaaaaatgtcgttcggatcactggcactgaaaaattgagctccacctgggccacccatattaaagtggaatgttcgagctccaccaggtccggcgcctgggaagccgccaaagcctgcaccagggccaccttcagcacccggtggtggtggagcagcattcccttctgtgataccgtattggtcataaagcttacggcgctggggatcgctcaatacttcgtaagcaagagaaatttctttaaatttcttctcaccattaggatttttgtctggatggtatttaagtgcaagttttcgatatgccttctttaactctgcctcagaggcctcggggcggacctccaaacaatcgtataatttggtatctgctaccatgatgttttgtagtaattgttgttttttctatctgtgtgaaatatgaaaaaggaaagtgcgagtgtagatgctttatcaaacacaaacacaatataaatcgttatggtggaatcaaaaaaacgagaaaaatgaagagaaataaatagaaacgaaaaatcaaacaaaagcgaagctttttcggtttatttgttctcgaataaacgaaatgaaagttttatttttccacttttcttgtgttataactcctttatatatatttcgtaagaaaaccttacaattcaaattgtacaatgttcctgaattttcaagaaaaatagtaccaaagtagtgtatgtaaagtcaataagaaatactattctttcgaccaaatattaatggaatgtaaacgttgcaatacactctaaatatcgtttggaaacgaaacaaaatgtgtgaagacagtagatgtttttgtacccgctgggacggaccatataccatggcatgatgtaatgctagaaacttcgagtataagcgagaaactgatgtggtttaacgaagtttcttaaatgcacaatgtaaagtggtagagttcattattgtgtttaacgacgctataatgggttaactgtttattgaaagacgtattgtatgtatttgtacaaaatataaattgattgcgatatttttatattacaattctacaaagcggcagttactttgagatagtactttgttattaatcttcagaatttttttcagcaatttcgaatatgggtatatcattgtaagtatactgtagtctggttattgcttttgggatgtgtgtgtaagttactatagttgccataaaataaatgtctattgcaatttcggtactgtggtaaagcatgcagccttataattttgtactgctcaaaaagactacgcgatatacatatagtataaacccttcaacattgccgaggtccatgccgaaagcggcatataaaaggccaaatttttttaaatttttgacagtcaataaaaataatcagaactagaggaaagagattcagaaaggcaaagcttctgaaacactgaattatttgcaattgtccaaaatatagtcaattgtgatgggaaaaaacaagaaaacaacgttaccgttgtatgattttcaatcattcatcgagtagtatagcataactattctatggaatacaagtccattccaaacattttgttcagaaatctctagatagagggtggaatgtcagtagcggtagtatgtgcaaaagaagaggctgtgggcgcaggagcggcattttgacgagaaacgcttttgcaaatacggatcacatgaggagtgatatagggacggatcaagtgtctgtagataatggtagcaccgttgaatttaggcaaagcaagccaaatcaagaaaatagccttgagtaaccaatacacagctaaaaaggaaaatccccagttagtaaataaaaaaaataaatttaaaagcagagagcaaaatttattagatccttaatgatcttataatcacgcctctaaatacaaaaaatttaaacacttacggacatagtaaaggattagctgagaccagtactcaataacgttgaggaatgaagttaccaaataataggtcaaccattgagtgtcatcggccttgttagtagtttcaatagcattgatactaaagaaggcaggcatcgcgaatgccagaaggttggtcagtaaaaatccaccccagttcaagaaaaggaacaaggcatatataccagctgcagtaagaaaaacataaagcttgctaacaccaaaatttttttccaaactgttgagttgaggaaaggctgccaactggaaaaaaaagttagtaaacaaatttgaatagaaagaataatttctaaaatcacaagatactaataatagcctatattgccgagtgcgtaaagcggcttccatcggatatcctgccttattgctaacataccctgttatccaaatcttgcatattctgcttaacacgaacttgaaaagacattttggtactgcttaattaaattatctgagtgttcaataatttttcttttgaacgaactatttgtcttagaatatgggagttgtttgctaaagataagtttgcatttattctatcggtggtagtgaacaacgtcacgattacaggcattcgcttcgtaccgtcagtgtggtatattaattagtgcataggaaagtcgcagtaaatacgatactgtatagtacaaatacaatccgattttcaaaagaattgccgtatgtattttcagccgatcaaacagtcatcttgtgtttctgtctaagtttatttacttcattaccaaagcatttaacagtaaaaaaaccatagcaaaaatgagcgatttacttccacagtatgctacgttgtattgttttaaccaaaccatgaacaactggactatgcagttcgctaaagtcaagccctgcaaaatatgtacggttgcattatctaaagttaaggaggacaaccgaactttacggttctctgatttaaagaatgtctacattacatacaagtctgcatagatatatatcactaccaacattactctttcaattgtaattaaattactactaaatgtaaacaagttttgacttaataaagtaaatttttaatttcttattaaatttatagtatcggtaattatcaaaaactcgtggatcgaataaaaaaaccatctcaagaataggatggtgtctaactgttaaaaacggcttcttttatctatttcaaaattagtaaagaattttcaaacttaagaccaaaaagttttaagcaaatgaagaatttcatcagtgtaactatgacaaaatgctttatcactgcaagaaggcaaccaaaacgattaccccgttatccttgctatacaatttgggtatatatttcgcatcctctgaaatctccatttgtgaaatgatgaaacttacctatttactatttagatgagcacactccaggtgaaagaactatgcaaaagcagaaagcacagtgccctttatattcttcttaatgtgactgtttttttggggttttcaagagaagatatcataaaatagcatacatagctgttaatcaaggataagaagaagtaatgttcatcgaaaataattgatagattagtttattgatattgttaatcatttgagtaatttctgatgttttcgttataaggatatggttgcttctttgactcagtaggattgttatctggtttttaaaatcgttacttgagaaaatcccctaatttaaggaatttttatatgtttgttgggattatagctgtctttggctactgttaactgttgtaatgacaatagttttggtttatctttcttactttagaccttgtagaagcaccggtaaatgtcaagcaaacttttcaaactgtaaagtgtatacagtctttaacgacatagaattatagcatccgtcaacagctaaataaattattcgtttgtctgtaaaaaataaaattgataacgattgctggaaatttagaatcattgggatatattaaggatgtaccttcccacgaagaaaacacattcatgagatgtttactgagacctgcaatgatttttttcattccaatacgtaaatgtttatttttttatgggcaaaagtatgcattcgtagatacaactctttttggccgttgtcaagcttaacagatgatacaatgaaaatagtaaacaaggtattcccaaaacagacgatatctcattttccaagagaaaagtattaacttaatagctccaagttcatcaaatttttttttggcgattgaatagttgtatagtttaaagagtttactcatacttggcaatggaaatgcagcatacttgttatttagatcttcccagatcctcaatttcaaaatctaaacagctatgggtaaacatatgcctcctctctggattaatgaattaaagttttatatgaatatacccatgagaaataaggtggatacagcagcaactttctgcacacactgcatcaattgggttttggaacgaaaccaaggaatcaatatataagtttgaagcacatgaaggcataaaaaaaatttcgtcttgagttcgatctttagaggtgaagtcaaagtaaaaacttgcgaacccagcaaatgccaaagatggagggtttaaacttcaataggttcatccatcagagagatgttatgaatttctgatttatttcgttcaatggcagctaattctgccttttttattgtaccagatacacgaaccacgcgaattattacaggcttgccatataattcccttattaaaactaatgcggcccatgccaaacgaaaatgctgtcttgagacccgcagaatgccagtagatgtattaggtgaaaaatattttacagttagactagatgcaacctttccaataccaacatcaccgaaattttctgcaaccatggttctaattattttagaaagactagacgtagttatagaactatcagaagggatagtaggatagtcaaaaaactcttttgcttcaggatataatacttcaaaaagtaaatatcgggatttgaagcgaaccatagttttacgatatatatattttttgtagtttaatcagcgattttgattgaaatatgacctttgagacaaataataataataaattatcgttatgctataacaagaataaataatgctggaaatggaattgcccaaaaatggatcgtagtgggtatgaacgttgctacttattgcacaccggttagagaaatgtaacttgctcaacgaataaatttctcagaaaacagtttatagagacgtctgtgttataatttattgcttttaagatttaatggaatagaaatttaaagaaaaaatcatattatctaacaggtgtttacaatgaacgattagaattagtcgtaaatttcaatatgtttaattgcttttgctacattgccatagcggtagataatttgtttaagattaagtaaatggtatttggttataattagactagaagacatgcaaattctaaatgcacgataatcatgcttacgacacagtaaacattcattttttaactttaaatccctttggaacaaacagttatagaggtctatcagaaacaatttcaacatcctcagaaaatgaataaattttaaataaaatgattatttttttattaatcgtttggttccttgcatgtatctatccctgaacagtcagaatatacaaatcaatgaaatcattcgtacattcagtggaatcatgaactaagtcagagcattaacacctcgattattcagtagaaaacgttaccctgtatctacttgatattgctttatatatgaccatgaatattagcttcaattgatatatgaatttgtcatgggaagaagttgtaaagcattcctcccattctactgattaatatacaatgggataattatcgtagttagtagtcaaaggataacattgattaaatttaaatttattctgatgaaatgtaatctttattcatataggtatgatgatctataaaaaatggaactttagtaaactttttttggccttcataataaaaaggatgtaggtaaagaatgtaatattaataaaacatgggtagataaaaaaaatttaaattaagagtaataatttttgaaatactgcaggattgaaaaggaaagacttttcaactcaaatgaaaataaaaaatatatgtaaattcaattaaaattggaattaataaaaattaataagttgcaatttgagaaagcttttttaattttcccagatctttgggaataaataattattaataattatttcgaattcatagctatgaattttcgatgatacgtaaatttccaaaggttcgtgtaactcaacgcactttttaggtcatgttggtttgtattaagtagaagaatataaaaatttttttgttaacgatttaagcaggtggtatacaaatgtcaagagttgcttgcatttacttgtgaagagagttcgcttacatgtttactaaatttggtgtatattttgctccaaaattttaaaagattggttatttttttaagactaaaaaatctttcagctattgtttttacgtaaaccaacctttttcctaatacttttgatttacgcatttgttgtacaactcatttattgtcttacatggtaaattgacaattttccaagatcgcgcgctttagtaaaataacaatatataagcgtatatagtatattttttatgagtttattcttataaaaaatatttgaggacacatacgatgaaccaatgtataagaagcaacttaccttttcaccaatttcaacagctgttaagagtcgttaattgttatagaatatagtatactctaaaaacgacaggatatcaagatgacaagtaagtcaattttggaaggattcttcataattaattaatgtgcggtatctgcatcttcaatatttttcagcggaatgataactaacaagattgctgtcccatagtactacagtctattttattcgtcacaggaaataaacataaactggcagatgtaaagaatatccttggtgaccgatttgaaatcaaaaaccatgattacgattgtatgcagctattcaattttctcgacagcaaattatcgctaacatgatgttttaaagtaccggaaatccaaggaagcgtcaaggaagttgttttagaaaaatgtaaagctgccgctgaaattgtaagttcaaatgatggtttaggattatgctgatcaatgcaacgaattattatcgcaatggttattcgattgaatcttgtttttacttctctttgtcattcttcattttatcggagcaaccttctaacgctaataggttaaaggacctgttttagtcgaggacacatggctaggctataaggcaatgaatggactccctggtccttatgtgtatgtgaatgcagattgtgaattttataaaagttaacaaaagtaggaaatggtttttgaatagtgtgggtcctgatggtatgtactattgaacggatcccatagctaactagtataaggactttatcgcatggtcagtgcatttgatacgaaagaagcacaagctgggtgtacctttggatacactaagggccctggaaaacctatccacttatttgagggtatcctggatggccaagttgtacctcctagaggaagcaatggttttggatggaactctattttccaggtatgcatcagaaaagtttgaggttcgtctattaatattccttagcctaatggacataagcatacctatgctgagatgactgacgaggagagaaattcatgcagtcatagatacttggctgctatgaaactccgtgactttttggaatcggaaaaaaactaatcttttttttgggtaaatgtattgcttcaaatactttaatcgactccatattttacctcggatttaacaaactctgtgaaaaactttacaatttgtggtcttttttcgatggtttcttcccttttatcgttgtcatattacaatctgaacctacgctacaaattttatgtagtatatttagaatagcactaccactttcacgctttaaacagtttttaggttttatcttgttttgcttaataaaagcaagcttctaaggaaaactagatgttttaatcgtttttatttatcaatactatttcatcaacgttgaatatcaataaatgtagcatatttttttactcaaatctgaagacgttgaattcgagctgaaagtgcgccgaagttcaccatattggccttaaaaatgtcggtattctattaaaaaaggtttcaccgtctggaaaatatctaatccaattatgatatatattgtacgttatatttatggatgcatttagtagacgaagaaactaacaacagattgaaagcgactttttggcggtatactacgccattaaaaatattccacttgagtagcattgagccatgtagtaagtaataactagttttattaaagcgaaagaagatgtttacgattaaacggataaccaaaaataacgatgacatttcaatgattttttttccagtttgtaacccattgagtaattctcgataaattagattccatttcttcaatagattcactaggaagctctactacaatcttggggtcaaaactctctcttgcttcttccaaacaaatttgcattatttcagcttcgttgttctcctgaatcttttcaagagaatatcccctagattccagtctttcccaaagcttcgaatgatcggtgcgcaaaacgactacgagatcaattagctcctccgaaaaaaggccacaggtatgccagtcaatgatgcaccctcctttcaacaatttcggctcaagataatctagcaccttatcctcgtcaacatcataggttttccatttctcatcaaatccaaagtgtaaatggttctctttaacaacatcgccaatgcatatattttccagttcggtggtttctgccacttgttctgctagtgttgtttttccagtactagggaaaaagttagttaataaaaaaattcaagtcattgaaaaactctgaaagcgattaatagcttctattttcgccatttatagcgtacatacccaggtgtaccacagattataatattcggaagctctctttcttcattacccatagtaaacgtttttatttaaataaaacaagaaaaagggaattaaagtatgtgtttaagggttgaaaaaatctccttgataacaaaagttgcagactgctgaaatgtgaaaaatttatttacttcgacgttgtgtaaaagaacatgattttaaaaaacagcacatatctagaacttaaataattataaggcttgtgggcctcattttgtataaatttttaaattaattgaaagcaaatagtataaaactttggtacataggtttatatgcttttacgctaccaatagcgccataacttccaaatacagtatgatcattgattctacctaacctatacattttcaatgatattaagcccattgttgaattccctgtaaatgaacttataaaatatcaccatttacctgaagaacttaattttgctttatatttgaatatccattccatcgctgtgcggtgaagtcactgcattaacaagaacccaaaaatcaccatgtctcttcctctccctagttttttaagcagtaataattataattcttcggaaacgagcttgctcacagaaggccctgaaagtgatgaagaggacgagggtcctctgctgaagcaataccgcctcaaaaatatgttaggttatggtgcgtgcagcacggtctacctagcggtcgatgtttctactaacattgaatatgtatgatttttcttcgtcgaaatgtaagactatgcatttcacgaaggtattaaaattgctagagtaaaactgctaaccaattatccatcacatgagagcatgtgttggtcttaaatttaggctatcaaagaatttaaaaagacaagtcttaggaggagagagaagttccggctcatgcaattggaaaaagagctgggttcttttaacgacatggactcatcaacaatcgaggaccaaattcgtaatcaggagaaaaaggacccatattattatattcgaaaagaattagatgtgcttaaagtattggatcatgagaatgtagtaaaactttatcaagttatcaacagtgactataaagattcgctgtgtatgggtatgtcaattttataaattttgcgcgtgtgaacattcgaatcttgcatgccaaataaactagatcatttattttcaatttcactaacaacaattagtcctcaactactgtcctggtggaaagttggcatcagtagaccatggaatttcctttgatccaatgcctctggaaacttgcagaaagagctttcgccaacttgttttagcagttaattacagtaagttcttctttatgagtaatgtacagacgttaatcttgttcccatatagttcatggaaaaggagttattcaccgagatattaaaccggataatattttgtttaaggaaaacaataacctatgtgttattgattttggactagcagagtttttaccaaaggatggatttgtaaaacccgcatctggcaccccagcttttatggctcctgtaagtaacattttttgtcataaaatattaacctctttaggaactcttcgataatgagctgaaaaaaattaagggtaaacctttggatatatggtctatgggggtgaccttgtatgtaatagcttttgctgagtttccatttaatgggagcaccattctggatatgataaatgtaataaagggaaaaaggtatgcagaatgttaaaaaaatttccccggacacgatgattactaatatatataacaattatagtttgatgatccctgcctattgcaattccgatttacggaagctacttgagagatgtcttgagaaaaatccagaaaaacgaattactattgaagaattgctcagggacccctttctcacagagcgtggtaaacatcatttaacgtcttcttctatcgtaacagcattctcttccatatgggagatataggattactgacaaatctccaaataaacttttgttcaattaaaatgtaatattcaatacgtaagacaccgttgatgaacattttttgttgctctttaattttctccattcttcatttaatagcttcaacctcattacttacacatctaatttttcaagcttgaagacatatcgatgcttccttgtttaacttcttctctacagtcacttttaggcactatgatgcttttatgagcttcggaaccaacgataatgtcgaggattttaagtcacccttttgctattatttatttattttaaaagataatcatccattattatgtctcttcatgctttaatcagacctggtatttccacatatgtcatgagtaactaaataacatcaatttataatatccaaattaatagttatttttatacagttatttaaaaaaggatagaaaatatttaagaagaattcaattacttcaattttaatgctgcacttggtgcaaaaatcgaaattaaattcctgcgtgtacaactcactttgaaccccgcataattaagttattgactttttaaagaaaggctactttagagaagacagttaaattttactgttttaatgaaatcgttcattcctaataaatacaattagatggatttacaaagaacaaatcaagatactggaacaacaacattgtttaaagttgttatttccaacacagtaaattatttgcccaagggtgtttggattctaagaaacaatacaatagattctttgtaagtagcttcttgaaaatgctagatctaataccatttcaaggtctatcgccaaacagtttagggagatcaaaaacaatattaatatatcgcatctttcgagagaggtaataacctatattcaacactacgaattgtgaaacctctagctaatttgtactagaattattgggttgaaaccccttttggaaaggttttccattcagaagtagtatctgaagaatttatgcagatatttattgacaaaggaaataaagctttaaacaatgaagaaatgatttttgcttgtatgagtgaaaagggatggaatgtgtctttggaaactgttccaaatttagatataccagtgggtagttatgagacacagctcggtttgccggtaggtctacatcccaaattgcatgttcatttgaaaaatctgcataaacctgaagacgaatgctctttgcaggggttcatgtacataccacctacattgtttattgacaggtacgagctatctaatattgcggaaatgcatgccgacaatttagggcatgttttaggaatttggggtgagaccgacttggaagcacctagttacaaattaaatggtactgggtcttttttctggtttgacatatatacggacgatggtttgttgcaaaaagactatatagacactatcattcccttacacacacgttatcaaagccctctcaaaggacaaacatacttaaaaacatcattaacaaatcccaagtttttctggaattgtgacactgaagacaaagtaaatgatttcagatttctgttttccagtaagaacaaatataccttacaaaacgatccaacaaccttaagcatatctattccaatagccgatttatcctataaacatgtcgtagaatgggtgactaatggagtcgcgattttttcgttcttctacctattgctatatttgtggaaaaggttccgttacgcaaaggattaagagaataacatcgtgaagtgaagtaactagatatgtatttataaaaattaattaacctatggatcgctacatagtgaaatatgaactggttgctttgtgcttgatatcacagcgtaaagttttctcgaaacaaaatcgtgcaaataaaccaatcaaatgaagtataatgatgggatgtttgagaaatttaaaaaaataaatttatcattaaagtgattatatacgtcgcgaaatataaacaataaattcgacagatgcggtatggctagacatcaaaatttttaaacatagcagtagtgacatactggggaaacaaagttagtcaagcaacgcgtataaggaaccgacttacctttcgatgatagcgcgtagtagcacttaaagcgagaacgcctaactgggtatttgcagctgctaaatggtttaaaaggacgtgattaggatttggcaagacagactgatcctccttataggcagtatttgagttaaggatacacttctcaagatgaggaggtagagaagggggctttggcaacttcaactcttgaagggtgttgctagtaagaaaagctggtatctccgtagaatattgctcagattcagacttttcctccatcggaaggtccgtatgaacttgactcaatctttcatcaatactagcgcctaacttctcattagcttccacctcgaggtagttgtaaaggttgccttccgcatcggtggcagttggaaaatctgaagaacagcaccatataccatcaaccaagaatttaaaacgctgagttccaggacgtaattgcaaaaggacagtgtaatcttcgctatttggcgaaaaagttagcaagcttaaaacaggataaacaacctataaagggaggctcaaatatagaaaaaagcacaccatgaaaaactcataccttttcagtaattggatttttttcttccaacgagaaaacgatccagtgacataaacaacttcaccgcctcctctccatcgaataatggttggcacacaaggacctatatgtgtaagtaattaaattgtcaattgcaaaaaatctcctttctgaaaactattgcaaacaaacgttaaggtcaacagcttaaatgataatgcaatgttacggtaaatcacccttgttacataaggatgtcaagcaatcaaataaaccggtcttaaagaaacttaccagaataaggctgatgtgtcttcttgcctgaagtttgagaacggcgtttcgtatgaccactcgatcctgaagttccgttttgggaagtacgattattaccgccttcctgctgattatcatccgacatttcaccttcttgattcaaatcatctgcagcaatactaatcatgctttgggcacgtggttcttttggaacgttatttgcattgtcaggcgttgttgtggcatcttgagaagggacagcatgtgcgcgagtctctcctaacattaaattagatacttatttcacatgtgtttaacttaaaggacattaccctcctgagattgaacatttcccattttgaaatgatgtaaagtagtttgttctggctttgtagctcatcactttgaactaaaccccaacgagcatgaaataaggttatttattgtatctaagctatcattaaatagtggaagctaaagtgcagcgttattcacagttaaacgcttcgtactgttttgcagctttatcaaagaaaacattaattgaaaatccatttattataaagaataaatatctaaaagctgtatgataaaagctgaaaaatttaatattgcatttgggacgtataatacagttctacaacagctatgtataatcttttgaaggtaaaaagcagcatgcttctcattcttaatggaaatgtttaaaaaattattgaagctacatatgaaacgatatagaaaaattttaaactactctgtgcattgagaggccttcaagttaattatacactaaaagcggttcacttataattattgtaacttagcgaggctttaattgagttaaacttccataaccgaaaggcctgcatattatatgtttataaattaatgaataccttgtacattacgctcgtatagcttcatcttttttaactacgttctagtataacaatatataagtatggcgcaaaaacttctttcgtaaaaaagacgcttctatttctcagacgaaatcactcaaattaagttacgaacttaaaaaaagcctgaatttctagatatcaaatgctctatttccgtcaatttttcatgtctacttattatgctgcgaaataagcgaactaaaatcactgcattgcaaaaacaagaacagtgttttcaatgaacgtactgattaaatacattccatatgaaacgaagaatatattattttttagttaaatgacgactttaccaaaccaaacgtgaatttttgttgcgatgaatccttcactttataatctataacgaagcaaagtagtgaaaacttatatgttgttagtacgcagctcagtattggtttaatgatacaataaagtatgaagtattgttttttgatatgatatgttccattacaaaaatgtcatgaattgaagtacatatggttgaatatgctgttagagtactctttccgttcacctaactcaaacgaaattttgatttcagtggtaatctttttatgctgttttaaagccacgaacacgaggaaggatttgaaatagaccgtttaaatatacaaattatacccatacatatcctagaggcttttaatgaataacctacgcgatttattgtttgctacgtagtttggtatttgtttagcgatacactaaaatgcgatgagtttcttttgcgggctacaagataacggtatgggtatgcttcactaacaatattatatttattgttataagtctactagtattggtgaccgatttagctaataactgaactgaggaacgaggttcagtttgtcttaatttaaagcattgaaaaaactatgtaataaaataacatctttttattattgaacactattataatcttcttgataacttatcttgtaagtaaatagagcaaatagaatattagagcatatgttatagtgtatcgtagtgtattttatataagctgacattaatgtattgtaggaatagtagtatttagaattggtatgtacgctacgcagtttggtatctgatttaaggatacgtagaactacggtgagttttccttgtgatctattatattacaatacacaggttgtataagtagcaactgagtataggtattgtattaactgggttataatgttacctatcactaatatagctcataactgaactgaggaacgaggttcagcagtagctctatttatagtattcagataatattgatcttaatagattatcattaagatcaatctccatatcgtatcatacatggtacgatatataattagaacatgtgacatatagtgatacgcaacgtagtgtatcatagcgtagtgtcatattgctgacatggtatacaagatagtgcattacgcaaacaacttgaaagggcaccttccttgatcacttacatccagagtgctaattattaagagcactaatttaaaacttttttgtttaagacatggatctctcgtttattgagggctttgaaactatatggactgtagtcagagctgtagtgctcaattacttattaagaagccttaaaattctatctaccatcctatatgtgagcgctgtcatttcctggaacgttagcttgaaggtctttggtaatgtactacttccaggttttctcacaataagaacagttgtaatatttattttacgaattgtgagcctatttttatggatccttgctgatcctgctattcttttggttcaaagcgtgtattggtactttattcgtgcgcctgcaagattcattttaatggtcggaattactttatatccattgtatgttttgctatcatgggctgtatttcttggaatcattgtagggttcagtttgaattccgtttttactttcattgattcttttgcaacgccatcgtccaattccactgttacggaagccatgacaaagatgaaaaatgaaaaagttttagaatatccttacaaagatagaaatattatgttgggtgatttggcttctcgaattccttcgaaggattccgaaaaacttgacgaagaacgtcaaccaattgctctcgaaaagacgaaatctctcgattccattagtcattcctcatcttcctctagaaaatctagcacagaacttaagatacctcctgttgagaccagaattgttgctgagattccggttccttcatctgtgaaacgacggaggcatcgccctaacaaatcaatgggatctattaaaaattcctgaaaaggaaattaaaagaatgaattatctcctcttgatttcgattcatttgttgttttgaaatcacaattattatctattaaaaaggcagttatccgtgttgcaaattgccatttactaatatgttatgtttttaatgagttaaaaaaaaagactttccttctcgatgttttgctggattcttttttgattttgcttaatttactaatgctctttcttcttaatccgattttttcttttgataccttcttgaatgaacagatcactgacaaaacgcatatttatgtttgcaagtggatatcctgactcttctaaatgaataacttgttttttgatcctgttagatatatacgagaacaagaaaatttctggagtttggacctttgattggtttcctgcaaatctagcagcatattcgttgtagtaagttttgggtaaacggctagagactttatatctgttttgttttacctaaaaaaagatgctatttccattacaaaaaactacttgtttcaacaagacttttcatgcttgacatttttgaatgaatgggtttcaatttttagcagtcttaatttttttcctatagtagacagattaaaatcgtgaaagtaatttaatatatatatttatttaaacactccttgggttctctatctttgatgattcagcacacatgaacagcttagacttacaggagttaatttgtaattttataagaataaagcgatatacgtttgtaacatttttttattttcataatatattttgtcaagcattgtgtacatataagtttgcttataacgagaatgaaaatattatattgcagtctcatactacttaaacgcacactatttaggtatatccaacataataaactgccattgtcatggcaaaaccagccctcaaagcagctaaagaagctctagttgtaaaaaattatgaattagcgatagaacaatcaaagaaggctctctcgtttgacgccaacaactataatgccaatgtatttttgggggttgcatatttctcaacaaaacagctttctgaatcaaaagaggcttatttggatgcaataaaaattgacgagaaagcagttttggcttggcaagggttatggaatctctatgaaagcacacatgacatttcggagttacataaaatcacacccatcttggcttctaagtttttggaactggaagagcaaaacaaatgtctcaacaccgtcaacaaatacatggaagtagtaaaaaagtatggaaataaggccgatgagtttaaagctttaaaactgcttactccggaagaaggtgaaatttatgaatatctagagggaagagttcttcctcttcaaactgtttacatgcaaatggttgatattcaagaaagcatggatcgttgctacttcgaatcagaagtcaataagcgtaaaacacgtctgggtgcgcgtcttgaacaagttatgcgagatgtggagctggaaatttataaagattcccctttagagacactttataatcagattattaactatgcggaaacggatgaaatacgtcggcttactgaatcaaagctcttgcacatgtataacaagcttttaatactttcagaaataaaagaaaaaagtcattggcgcgaacgaatttgggatttgattcaaggaatggttactttgcacatacctgagcaagcagcatggacgatatattttgaatggcaggatcactctgacatctcattttttcaatctgcagaactccaggagtatatagagttgtttccaggatctcccttagcccaggctcttttcgcatttcgtaattccgacttgtggcacaaagagcatcccattcagctagaagacagcaacaatagcgctgaactagcaaaagaaacaaaagaggaagacgattcagagaattcggtcgacaaaaaagaaaatgaggaagacattatttcttctaccatgatgcctcaagatgaagtccttgcaaatttaactgaggcctacgagaatgctccacaatctacaataatttcagagtgtcttgcaaagtactatattcatttaaaggaatatgaatatgcaattgggctttccaaggcggctcttgaagttttaaaaaggcttcagcaagatactggtgttaaactagataaactgacacgtatcttccagctttgtttggctattggttactcacactatgaagttccacgttatttatttcaagctatgcattattacgatatacttttagcagctgatccacggaattaccatgctctgcttggaaaagggcttgtccaaattgaaaatgaacagtattctgatgccgttaaaacccttggtctactcttagacgaccacgaaaatgatccatctctttctgaattgtcatggtgctattttaaaactggcaatctgcctaaagcaatatcaactgttgaaaagtgcttagatgttcttctcagtatggacgttgagcgtttcaaaattgccgaagcttattaccgttacggaatatatatactcaatcgaaaatcggaaaactatctcgaagattccttttcagcttttgtttcttcacttcgcaaagacccaaattatgctcctgcatatactagtttaggcttgtattatcgcgatattcatgatatggttcgtgcaacgaaatgcttccaaaaagcttttgagctagatgcctcacaggtcgaggcagctgaagcccttgctaaaacatttgcagaagcaaatgaatgggaactcgttgaggttatttcgagaagagtattaaacacttcagaaaatgatctcaagcgtaaaaaaaagttcaattggcatcacacttcccttggtgttctcgaactgaatgctaaaaatttccataaggccattgttcactttcaatcagctttgagaatttcccccaaagatacaaatgcttggagcgggttaggcgaggcatacgctcggtctggtagatatgtctctgctctaaaagcgtttaaccgtgcatcaattttagaccctgacgattggtatgtcaaatatttcatagctactttggaaaaagacatgggtgaatatgaagtggctgtttctacactttccgaaattttagctgtacgatccaaagaactctgtgttcaagtttcacttgctgaaacttacgtaaggctagccaaactttaccatgctcgtggattttatagtcgcgcagccgatagtttagagaagtcgattcaaatttgttgcaatgttttgaaagaggatattacatccattttttcttgggaaatattgggggacgcatgtttatcattctgccaattaaaaaattaccacaaccgttttccgaattctttgatttctgatattttatttacaacagaggctatgaaatgtgctaacaatggcaggcagtttgaaaatatgatatatttacctgacctggaaacatcttctggagcaatatttattgctgcagtcgccataacttgctttacaattcatttgtctttggttgcagatgataaattgcttttacctgtttcttggtacaatcttggatcttcttactatcggttttacgaatgtgatacaactaaagatgcgacattgcaggttgccattaactgtattaagcaagctattaaattggaagctaaaaactatgttttttggaatatgctaggggttttattttcccaaaccaaagctgtacgctcagctcaacattgttatattcagtctcttcttctaaatgaaagaagttccggagtgtgggcaaattatggtgctctttgtatacaaaatcacgatgtggaatgcgcaaacgctgcgtttactcgttctatctctattgacccagataactcacaggcttggttgggtaaagcttattgttcaattgcggttggatctattcggaaggcagttcaaataatccatcatgcatttgagatatcctctggtaagatgccagatgttaattattggtacgccgacacgatgctacatgcagtaaacaccgaggacttcgtgacaacagacggcgatatttggtctgcaacctatgctattaaaaggtatcttggggaaaatccaaccgatacatttgcatattatatcaaggcttccttactagaacaccttggggagacgacggatagtgttccctcggcgatacggttgtgtgaacttttagaacaggagtacgatgtttccgaatctcctgtcatattgaagagatttattgatgcaaaagccttactcggcaggttatatttggctaagaaaagttttgagaattcagttgaacaagccggtattgcactggatttattagaaggggaagaagacgaagatattaaacggactacccttggactgaatctcacatgtggaaccgcctctttctttttgaataagttagagaaatcactggattgttttgaaaaggctttgcttgtgagcgattcaaatgccgacgtcgtagttttagtatccaaggtgttatgggcccttggcagtgagaatggcaaacaagccgcaagggaacaattatttgaagctcttgaacagtcccctagccatattggttcgttgttatgtcttggtgcaatagctatttatgatgaagatgatgctgtatgctctgcgattgaagattccattgctcatttgaagaaagacgaagtacttcgtagcggggccctcaaacaagttcagattatggaggttttattaacgaagaaaatagatgaatcaatgattaaatcgcttttacaacgatttcttcatgtttatccgtttgcagcttctagttggactttacttaccaaccgttatgcttcaaagtctttagcaaacgcatttgctactacgttgtatacacacccttcacgaccagacgatttggctcagtcctatcgtttgcaaaatagcattgatcgtgcacaagttgccatccacttggttccatgggattccgcaaattggaaagctttgcatggtgttactcatgaggcactagtttcaagtgatgcttcgtaggaacttgtatttattatcaacttaatgaccccagcgaactatatctaccaagttaggaaatgtttgtggaacctgtaaataaaaaaacgagtcttcattttcatgatgaggatatgtaaaaattgaatattggataaatactccggtgctttaccgtgtacgaatcgatggcataaccccttacctagagccatttttttttatgttggattcaagacaattcaagaagattgaacgttccaacacttgaatagtaagaatgaagctaatgaactgtcagattcatttcatgtcatcgagacaattttaatctcttgaagcaatatccttgtattaattggtatgatgaatttgtttaaaggattgtttgtcatcaaagaatcaacaacgcttacagatagcaaaacaatccaaccactcactcaatttacaattctagtctatgtatcaacatttaaacatggatcaaaggaataaacaaatctcatgcaaatatgtcaatctctttaactctcagcaagagcagattggcaatatccggatcaactttgaaaagacataaagaacaattttctttgcttttttttaacgagcggcataaatattgtccacaagagtttagtaaaatacaggttttcaaaactaactggaggtttaaaagaaatctgcactttttgagcttttaaaaaatgaaacacatcaatatgttaaacaaataaatatatatacatattaaggatgttcaaaaccgagtttagaaagtgttatagtgccacgaatcgttctttgttcatacttagcatacaaaaaaatgctacaagtctaacacgcactttgctgacactctacgatcatctctacagtttactaagagaacggttcaatcgttctatcctaagagtggaaagcattttgtttatataagcgaaagacagcgtaattcgtcatcgatttagcagtgggttgaaattcaaacagccaattattggcgcttataatcaagtaaaaggttggatgtgacgttacaacattaatgcattcatgcattgcacgaaatgtaaacaaacgcctaatgagtggagtataaattacctctcaacatgtttatttacattgattaaaaaaaattagtaaaacaaagaaaaaatcaatgattcttagctatcatgaagcccaacatgaccagcgagttgtggttcgttcagtcgagtaagttcaataaccagtcagtcgcactgaatttggcaggaagaaatgactgcacagcataattagaaaaaatcctttgtactttctagatcaagcactaatacaacagtacatactctttttggcaatacttgtacgttgcttatcctcggtttaagactgtgtgatctcgagtaaaattctgccctagatgtagcgaccagtaacgggtgccggtatattcaatacaaaaaaggaatgcagcgaagtcagctagtgtaaaaagcgagtatgcctgttattgataaaacttcatgattaatactaataatgatgggtcgattgataatcattgttggatttataagtgtgtcaagtagtaaacccagaacgatttttgaaagcgacatctcctatagaagataaaagttaatcaatgcttattcacttaacaaagacacatccaagatggcttccgcaagtaatgttgctaattctcatgaaattaatattattaatcattaattcataaacaatgaaaaattaagaattaactagtaagtaaggtataaattattgattaaattcctgtacttttctatggtagtcagcagcactctgaaggtcacagaaactaaattatgaagataagtagcaaattcaggttcccttatttgaaatcgtgactattttcaaactgctgttttcgacttaggttaaaatgttttgtcatcgttatcaaaatcactttcataattaatcaaaaaatttaatgtccagtgcatattattcttatgttgcagaatctttcaagcaatgcacttgctcatccaattcgtcaggaaatgaaaccatgcaataaaaatacagtgtaatatactctaaacaaattcatttgaacgttttggtaatcacaattataaagatgcttcttcccattgcacattcttgtagagagtttcgtgtaaaaagcacctttgtaatacaaataataaagctagcaatatatttaggcttcactttcagggttcatttcacgcaacagaatagtggcgtcttcattcacgtgctgtctgatctcataacctaatgatgattagcaaacacatttaatgtgattttttttttttttatcatcaaatttaccataaaatgctagtgttcttttcaccaaatctgtagagcaagatcccggttccactatgttgtcagtattaattttgtttagtaaacaacaaacctgtttcagcaatgaatatgagaatgcttgatacagccatgaaagtgaaagcggatgccgagcatttccacccccatcgttgatcacccaaatgtgaactcaatttgttttcagcttttaataaaaccaagcaaaataaagaacttttacaaaaagcaaaaatcatgtttctccaattttttaaaaagtgcttgattccttttccgcaagccttggaccaagtttcatagaagtctcatgagttagtgaatgaaggtaagattaaccacattgtctcacttacaagtcaagaatattaaagccaaagtgcaaacaagacaccaaaatccaaataatgtccattccgctgcaccataatttttaaaaaaagcgtccttatactttagataacaaaatgctggagcattgaatagaatgattgaagtgaatgatattagcagtattatcaacaaaggggaagaattatctgtcgtcccataagaatggttttctctatgtgtgttaagaggattatttacaagtgcatgatctgtttaaattaatataatgaaatactttagtaaagaaagagcatgtatcaaagtgtgtgcattgcatggccgactgtaaacaatgaccaaagcatgcaatttgacaagatggcaagtttcaactttcaattgagtaattcctttcttattatttacaattcttacctgaatatggtggtaacgcgccctcttcctccgaatcatattctgggagtggtcctttttccaaatcgatttcatgatctgtcttcaattcatcttcttcatctagaggacttttcaaagaagtgtaattattcttcatttcatcaagatcattctttatttaataaaacacatgcgcgaattaattgctgtgattgcgacaaacgaaacagcgaaatcaagaatattcgctctgtagtccaattccaaccacttcaaagactttttaacaaaataataaaattgttcaaacaatggcataaaaaaagaagaacgaaaaaactgaacgaggcagtggattgcttctgacacatttattctgtcactgccctttttattcaccccaacttaaatttccttataaatcatattgtaaacatcattacagtacgttgtgtatcactaatttcatatgttagaaatatttggcaaatcatgtatctaaatatagacatcagttgataacaaagattaggaaatttataaatggaattacggctgcctctcactcctcagttcagttattagctatattggtaattgatactattagacatccttataacaataaatataatagtattagttagcatagcgtataccgctatactgtagttcgcaagagagtcactgcagttcaatgtatcgttaaacagatatcaactgcgtagctgacatatttttgtgcataattataattcattatttatgatttgataatttcgtatttgtactaagaattggacgaacgatgagcgatggtattagacagatgaattttatcctttatcattttctgtctttttgtttgtgtactgtttcttttcttttcttcttctcttccttttttttttgtaaagactggcaagtggaatttatcaactgtattatagactgttagttgcaagctcgacgaacttacgaattgagtttataattatattttaacaaacttgcacttttaaaattcctattttaactagtatgatttgtaagtaagcctttaacatcacaatttatactgcaaatgaaaaaaccgaaacaactgatgttaccatcgaatagtaggttttttaggaagaattatttaacgagaagtaattgtataaaaaaaattctaaacttttggttacgaaaaacgatctaggttccttcgatcacccaggtctgctgaactctggtagataaactatcttgaagaagcttccccagaaacctgtctattatacattcaagtaatgtacaatcattgaaaagtttttttttagtgttcagtcgagtgcgaatttttattaaaaagcgctaagcaagtttggcttaaaaaaaaaaaaaaaggattcttctttattattgcttcaaattttattatactcgagtcgttaaaaatataaaccactacgagaaaagaaaaaaattgaccaacattgtaaaaaaacttattgtcttatagggtacaggttcctccttgcctcttcagacacgacgtcccatatggtagtacaagataaatggaagagaaaagcgacattagcgtataaaaaaaagcatgacattcatgatgcacctgtaaaacctcgtaaaaaaaatttgggaaataacgaatggagatttaaaaatgcaggggaatactttgatgaagataacaatgaggaagaatatccaagtttggaaagtttgaagaccgtggggaatggagatacaattcaagatgaagaagaagatttcgagtattcaaaactacaagcacggccccttactggtttgggaattagcaaccaaaaacccaagtccaaagttcggactatccaacgtgaagaagtagccgacatgttggagagcgttgagcatgaaaagtcaattcaagaattccgtaagcgttataatgtacaaaagccaaaggtaaacattagccatgctgaagcggaagaagatattgattcttttcttgaaagtatggatcagtctgctccgccttccattacagaagataaaggggaaaattacatttcttctaatcattccagcatgcatatttcaagaaacgactctaggaactatatgtctgaaaagccaaacaaagaccaaagttggttagatgaactattacgataaatataactagaatgaaaatttaactttcaaacatgttattcaattcttttaaaccgttattgtatcgatgtatcactgtaaatccgctactagaagcaagagacttcttttcttgcccagcggctaacttttgtttcacagtactgacactaacgagttcttttactttaaaaattcttcccgcattgattggatttacatcgcaatagactacggagtgtctttttgttaacctcaaagaatgcaaaacgctgcgcaccttactaaaatattggttagcaattacaagcatgtttttctcgtttccaaaacacgtacctcgagagcccgatggctgacctttctaaacgaactcgaaagaatgacattatggtaaactagaagttcgtggagtccgtttaacactaaatattgaaactcttttagttcaaccgataaaatacaattcatatcgcaagctcgttattgttcactattattcactacgttgctatctatttaacgatacattgaattacgatgaattttttgcgatccacatttagtggaatgcagtatattaactacaatgttatatttattgttataagaagtctattagtgtaagtcaccgatatggttaaaaaatggagaggagcgatttacagtaacatctataattatcatctttctagtagttgtaatcacatggtgtctatgagtatagacgactacttatctgtttactgtcaataaacggatctttactaatattccaacatgtaacatatagtgatacgcaacctagtaaatcattagtgtaatgcagtattaccgatatatcacaaaaaattatgttaattggtattacgtgtctgcttcacaatgctaatatcatattaacgatgttcaatggattattatttttaagatgtgaaatttggctgggataaaactttttctttaccaaaatggcacttcgtgctcaattcgagaattctaatgagtaagtttactcagcttttttgcttaatagacgcatgatattaacaaattataggattggtgtcttttctaatctcacaaactcatacgcacttgtagcgcttggaggctctgaaaacttctacaggtaagcttaacgtttatttgatgccaaaatttaatgttctaaatgtaaacgattcaaaatttttttaaaggttcttaaaatccttaaccagtcgaacgtattatgagaaaaataaatagcacatatgtgaatgatgtagcctaactactctttaattgagtaaaagagactttgctacataaatgcaaaccactacttaaactctggcggtttgctgttcattacctttattattccttgactcgatgcagctcgacaaattattttttttggcattttttacatttatcaacttttcactaacttttataacagcgtgttcgaggcagagttaggtgatgttgtacccgttgttcataccacaattggaggaaccagaatcattggtcgtttgacatgtggtaatagaaaaggtctgttagttccctcttctaccaccgataatgaactacagcacctccgcaattctcttccagatcctgtcaaaatccaacgtgttgatgaacgactttcagctctaggaaacattgtggcttgcaacgactatgtggcccttgttcatcctgatattgagcgtgaaaccgaggaaattattgctgatgtcttagatgttgaagttttccgtcaaaccgttgcaggcaatgttttaaccggttcgtattgtgcattgagcaatcaaggtgctttggttcaccctcgtactagcattcaggaacaggatgaattgtcatcacttcttcaagttcctcttgttgccggtaccatcaaccgtggttccgatgttatcggtgctggtctagttgtgaacgactggtgtgcgtttgctggacttgatactacggctactgaattggctgtctgtgaatctatatttaaacttcaagatgctcaaccttctgctattataagcaacagagacactcttgttgagtcttatacataagcagtcggtgtgagctaactaaaaaattattgatcaggatttatgagtttggataattcatcctacgtgatattttcctattaaagttttaatgttgatacgttatacgtatgtatctggttataaaatttttgatatgcctttcggtttaatagtcctatccattgtggtacccaagcttcctattgtagaaatttacaatacaagttttttatagaccattataacacttaagggacttccgtaatcgtgtttatttttattatgtcaaatagattttgaaaatgcttttattgctttgctttttgtctgttcttaacacattcggatttgttaagctattctcgcttatagagtagagcttcttgctaacgctgcatgagacttcgtacttcaatttacgtgttttattaagtagtttgcagcctttatattaaaaatgatctaataaatatactttcttttcagtctttggtgacaaactagttatggaaagtatttcgatgtaggtattttttgactgaaaccaatgcgtactccgcaagcgaaataaatatttaagaataaattaagttaccaagtaactatacaaagtggggaagtagaatagactacaatactcatagatatttatatttagcagtaaataaaactcgtaaaagattgtcattatcaggatgttttgattaaaacttccacggaaactaaggcccagctccaaattttgaaagtaaaacccctaattagggaataaataagtaggcagagcaccttgaaaaataactagatattaaactttaataccatttggtacttgattttcttcgtcgctcgagttctgtacatcattgtcggctacgttgcctacagtgatcaaagcttgctcaacactttcttctgcactagcaaggtcgatgatacgacgcaaataggtaacattacaatcatctggtatctttattttttcaagagatggagattcctcaaaactatcttgtagtctataatccaacacttcgtaagtaagttgttccctttgattgatgccttcagcaacaatatttttggacaattcagacatagtttttttcggtacatgagcctcgtagtcagcatagtcataacgatgtaagagtgtttttatttgcagaaaattaagagcataaaagtcgcggaccctggccacataatttggatcatctttcacaaattgtagtatcttggaggtttgtaaaagctcttcgagctgcaaataagcttccggaacaccactttctagacaccaatccttaagaacatgataattgtatgaaatattggtaccacgtttccaagatccacgttcatcaataaaaagtgaattgaatgcctccacattaatgaatcgatatatgcttctaatcaatgcattatatatttcataattaactttataggcctgacaagaatcatgcaccttatttagtacatgtattacatcggtgattttgtattttggtttctcaaaaaatttaatccgtagttttcgattctcatctccagcatccgtatttgtaccagtaataatcattgcctgaacaatcaatggctttaaaaaattattgacttgcctaacccattcgaaaaagatttttgacagatgtgattcaatcatctcaaaaatggtttgcactgattcatgagattcggtggataaaagagtgaaagccgaggaatgtttaaacgcctgctgcttagtataaacaaaagccaagagcgcatgtgtatttgcaacccaaaatccgatgtcaggtctctcattagcagatgatgtcttttgaaatacgtattctaaagtgtggacacagtaacgctcaaccaaggcaacactttcctgacacagatttgatttccacatttgtgatattattataaaaagtagttttgctaaaaacaaatgatcaagtttctgagcctcaacatcgttgtcctttagtaatagagttttaagagttgtaaatgttctacctgcatattctgtgagtttgtcaagatcgtgcttcaagccatcgttcattaatagcacaagcatctctttttgagtacgcatttccatcaatgaactatcacgacgtgatttctcttccgaattgcgcgactgttcgatactagaggccgaattcagtattttagtggcttttgtcagactagcaattatcctgtttttctctttcaactgagaggtttgctcaacaataatcatatcgtaatttttaagctgcgacttcaaagttgcatttactcttaaaagttcggtattcgcatcgttgacttgcctcatctcctcttccatcataatcaaagcgttttctttctcttcaagtaactcctttaattccccatcttgagattgatccgatataagtaccctagtttgctcaagttctctttcttgtgctaactttgcttcagcatagttggacagatgagactccaattcagcgattctttccctgaacttgttattttcctgctccgagttgtccaactgttttgaaatctcaaacaatctgctttcaagcctgtaagatacttgcttaaggtgactcgctttagtggattcaatttttaattctgtcaattgtcgctttgcaagtttcatcctccaaagagactggatacgaactgcataatattgtagttctttgtagtgcttatgggctttaaatgttaaccaaagactttgaataattaatgttgcatcatgctttgtcttttcctctaaagtctgtcttaataaaaagcctctaattatactttgcactttaagtatagaatttttcgtttgtatgaattcttttctctttaatgcagttctccaaagtgactgaagtttaataatattggaagaaagtaattcgtactccgtatggcgacgagataagaaaccatgagcaacggcttgaaagctcctgactctcttccgagacagaagaaaacgagtcctatagtaattaacagcaaacgcttcatacaaaagatgtgctgcatgtttcaaagctttgtctctcgcactctctaaaaggggcgtcacacctgaacgaaaaaatattttagttttgccaatttgatatttagtcggatcagcatgtttctctaaaattgccttgctaaaggtcaaagactccgtagttcttacggcagagggaaccaacatgtaataacgagaaacaaactcatcaaaagtccaacgggagggaaaaccagcacaagatatttttatagtttctaaaacaccgcatgctcgtaactgagaaaccaccatttggttatcaaatttccaggcttctttctcttcatttggcttgatacaacgaatataatgagcattagtttcgttgatggtactcattagactaaccaaagagcttttaaacattgaaccaagagtattactttttggcttggtttttatttttttggtatcggctgggggtgcagtttgttcaagacggaataaaaccagatccttgacaaagggaacgtctgaatttgtaaaaagctccaacaactcatcggatattgtatcacggtttttatcaataaatccttcggcacagtaaacaacgtcaagagcataatgcttaattgtaaactccttgttaccaaaccttgatttctgataactatttttgaattctggcttggagaatgcatcgttcaacttactaacccaattttcatcgctgttcgtgggcattcggcattcttcgtctaaaagggaaagaatccctaaacgactctcaatcatgctaatacattgctgattgtcttgataatcaatataggaccagttaagtccctcagcagcatactcctcctgttccagtttgaaaacatggcgataaaattcctgttgaagtttttcgttcgcataattgatgcaaaactgttcaaatgaattttttttaaagtgctcgaacccataaatatctagaacaccaataaaacttttagccgtctggttcgatttatcagctgagtacatcaaggctttattaatagtagctaccagccagtcgaagagtgaagcgtaaaggaatttcgctactgagtctctagctactacagcttgaaattcgttcaatggtttcaaaataccttcagaggccatctttattttacgcttcgttaaccatttcaccaatgaagaaggatccacgcccaacaatgaagtagcgtttatcagattttcgttttttgaatcaatgtatgcatcattccttgaatgcttaacctctatgttaccgatatgcagcaatgcagctaataagctaaatatgcattcacatgtatcattatcaatgccaactgtttttaatgcatcaactgtagctttaaattcctctttatcattgacgccctcaattgtagaacaatttccctgttttaaataattaaattcttgagaattctcaacaagtttccacttttcaagttgttccgaggatgaaccagctaaaatctgatagaaaatatgataatttctttcttgattaggctgaaatactaatcttgatctttctaaaagataagtttgaattttagcaccaatgattgtagcatttccgtcgaacaaaatttgaatatatttaccaaagcgagaagaattgtcatttctagaagttttagaattaccaaaagcctccataatcggatttgtagcaagtatctcattctcgacagcagttaattgtggagcttcatgaaaattggaatcggtggattgaataagtgcttgcacagaagcaaaataccgcattatgtatcttgcggaaacagtttttcctgctcctgactcaccagatataataatagtttgatttttatgctcttgattcatgcacttgtagctatcttcagcaatagcatagagatggggatctagctcatcccgagatttctccgaataagcacgtactatttcgtgagtgtacaaatttggcagtctctgaaaaggatttactgcgataaggacaatgccagaatacgtataaatttgaagttggttgtaccttgttgacaaagcatccaacactgacggctcatttaggtatgaaagatcagtaaggtcatcagcatccgagttaatggatcgaagaaacgggaggccgtttcttccttcataatttaaatcgtctggcttcactgtaataacagtttcctaacaagatcacattagctaattaatctcaattgacccaaaagggataccaaagaaaataataattttcgtacgttttcgttttcatcttgtaccgttaagaaagctttctcaccttcaactcgacaatcctttatgcttccagggatccattggctttgctcatctggaatccagcattgactacatttcgcaacaacaacattagcaggatcctttaaagacgattctaataaacttacagtcccttgtaataaatccccgatgtcatgaccggtagaaattacaagactccccgaacgcctaatttaaactaaacacagcgttttgtttacacacaaaaatagatgtttgctcaaaaaatgtcgcaaaacaatatgcaaatgctaaaactaatagaaaaaaagtttactaacgcgtttacgttatttcaaaactttcttctttacttatggaaaatactcgttctctgctgatgttaatatggagatgacttcgctgagacaaagtaatatgaaaagcgaattatgcaatttgataaaagcgcatagtggtttcactaaagttcataaaacctcaaataagaatcaaacttttaccattaagaaatcacgctatgttatgatatgttaactatcactatttattatgtttttaactttcaaggttggctttgttgaaaagtacaattaacatttcacatttcaatacggctagtgagttagttttttgcttcagaattactataattgttatttcaattatcaagtatataagttattataatattaaataatgttaagttgagcgtaagaatatttattaccaatcgtagtaaacatacataagattataaaaaattgcaatagaaactcaactacttcatcgtatttaaaaacagttgtctgtttactatgcaattttgtaattattttaacgatacgtagtaatgcggtgagctttccttgcgacctataatattgtaatacataggttataaaagtaacaatcaagtataggtattataatataaagggtatattgttatctatcacaaatgtagcttattgctgaacctctttcctcagttcagtagtagctatcttttatagtattctaatagcaagaatctttatcgaacatcattaagatcaatttcaatatcgtatcatctatggtacgatgacaagtagaacatgtgacatatagtgacactcgacgtaatgtatgatagcgtagtgcagttttactggcatattatcgaactgcattgctgatattaataactaataccgagctagctacgatttttatcagaaaacagtatgctaaataaggcaaactagtgcggcttagaattactagtaaaagaggaggtaagatggtacaaacatgtaaataataccattcaaaatcaacggtttgagcaacacaatggatttctaacagtaaaacatcagataaaaaaaacagaatattatatatatcataattctttcgttttgatagataatttcgtgctctcgttatatattcttgtacgagaatgatttactaaaaccgtttggaaacagggatattttcataaaaaaagcaactaataatctaacgctttgactcaaagacaaattcgatttagatagtatatgtttctgttttctcttcaaagaaactcagaagatgattactctcaaaatggagcatcaatactaaatattaattaattgggctatgatttcgattaaaaaagaattacaaaagtaaaaagtctataaaagacatgtttcttcgagatgagaagatgttttggaaaatgtatagtctgcagcataaacccaaaagagaaaagaagaattataaatgcatttacatatttttaggccaaactaattatgaaaaaccaaataaggtaacttagttaataaaatttataaggaatcaagttactcaatacttttagaacgtctcaattacaaacaaaaaaatgataaaccttcgacgtaacaacagcttccctcaaatcaattatttttaacacacttaagaaaaaaaaatatgtatttcattacgttcaacatcataataaacgcatcccctccgcttccaaaattttgggtaaacaaacaaacaaacatcgcttatataagaaccttctcggtagagatattgatcctttaacacacacggctgaagtgatttagtaagcaaagaagtaaattatcttttctataagtatcgtttatgcttaattgtaaagacttttgagcacaacgcatgcgtatggtcgatgaaccatcaaaatggtgtctagatttttttcttggacgtaaggaaatattaagaaggagaaaggttacgcagattatgaagattattgaccccttttttttagaaacgaaaaagtgagtatacctttccatggcgagtgaaactgagccgatgtagtgtttgttcaaaatactcaaaacaacgaacgaaaagaaaggaattgtattactgaccttattagccattgggagaccaaagagcacacttgcctgatagttttcttgaacttgagcaagaaatagcgattcgagaagaaggtgagtaaatatgctgcagacaaagtttcttaacataatgtaggactatctaaactatttcaagcaacgacaatatggattgattcaatttgtaagtagagatacattgacgccaaaacaattattttactgttaacaaaataattagtaaaaaaggtcgatggtgaggataaagaaaaatgtcttgcttgtgaaaatctagggaaagtgatgataaatcattcaaaagagttaccacaagactcaagctatggtaggtaagaaaagccttctgcctctattaactcatagggatcaccttgtcgcaattaggaaaagccaatctaaagattggagaacatcaaacgtctttagcatacaaagcgagagtatgttatctcgattttttaaaacgttatctagtacaagccaaggattttcattctgcaagaaaaaaattggaaagccgaagacaagcatacgaatctctcctacaaaagtcttttaaagaaaagaaggaagattcgcgtttagaagaagatattcgcctggcgctgtacaagttcgaagaatccaccgagcaagtaaagaatcggatgatcgcattaaaagacgttgaggctgatcagtaccaacaattaacagaactaattgtttatgagctaaacttctttaaagagtcgactggtattttaaatacaatattcaactctcaaaactcattgacgcctcagaaaaagatccaaagtagcgaaagaagcgttgaaaatgaatttcttgcatcacccatggatccatcacttagtaagttatttactaagaccactaatactgaaaaaatatcaccaacaccgttttctactccgaaaaggtaagtttaaagagtaaaaaaatttttttaaatacgctgaccaatagaaaatcgaaaaaggaaacagttttcgtcaaagcaatttattcatttacgggaaggaatgaaaaagagctcgatttgcacacaggggatgtcattcaggtgagcgaacaacttggaccggattggtacatgggcgagaaggtaaatagtaaggcagaaaaacttgggaattcaggaatgtttcctgtaaactattgcactaggatatatgacctccatgttcaaaaatcacatgaaacgagatctctcgagagggcgcgttcaatcagacgaattgtaagtgatgatcctagggattattgttcacctatcaaacaatctcctatacaaaacctcaaattccttgacagtgataactctctcttgagtagtcagaatgttgaagcttcttcccaaccaattaagataagaaagccattacctgaaattccgaataaataatttcttaggaacagtctgtaatgttctgaatgtttgctgcatgccttccttcatgcaaaactcttattatataacaattgaagacttcactttaagcaacccagtacttgctttaactccagctacccaacttggtaaatgttctacaaaagtgttgtatgcgggaataattccttcatgtatatcatcgtataaacaagtaacttccgctttgactacttcggtaattgtaaggttcaaagtgtaaggagcgtagaatgatctttgccccatgcgaacggatgaatacattccactaatagaattcccatttatagcttcaaaaaaaacagaagtattaaaatcaacataacaccatttactaccggagtttatacttatgtccagctggtgtttttctcgttcaatatgaatggacattggagttttcaaccctccaaaatcaggatctgttgattcatagtaacaaagtgaggtgttacaagatccattggaaaataaaaagtgtggatttaaagacaagacatcttgagtgaaaggtgatatgtttttaacataaacggtattgttcatacgatccatatcatacatctgaacaaaagaaagcttaagtggtgcagactcggtgaacggattaactgataaagcctgcacaaataatgtaatccaaagcatagtaagaacagcaagcgacttttttgacaaggcacgaaatatgaaaggtccactgttaaccaaagacaagaaaacaacaaaaataactaacttatacagcttgctggaaaaaactgaatcagtcaaagtttgactaccggctggtaaaatagtctcaacgagtatatcgtagcaaagaaatactggaaacggaacgttaaaaataaaatatatgacagtccaaatgttgtcaataagctttacatgtgctctatttgacaatgctatggaatttcgacgatgaggagtagaattcaacgtgcttccatagtgctgatgactactagtattaatagaggagccaatcagtgcgtcttcttcatgagtagtttgtgtggttactacattgtctacaaagtaattaattcgaattatcgtcattatacagcaggtaaaagtacaaaggtatgaaagcgtcacccaatatgtagaaccaagctgaaagtaaatggataaaataaccgaaacaataaaaaccaagtaccataaaatttgagcgtaccagataaaaacaatttcgatggaactaaggtcttcagaagaaagcttactgtgagtcgcagccgccctaaatgaaaacgccaaagcaattaagtttgtgagataaaataaagcaaggattaaaccggtatgagaattgatcacataaggatttatccatgttaacaataatacggtcaaggtatcaaatatggaaacaaaaatacaggaaacaacgaaacaaacagtatatctaggcttcttgagctgctcgtaaagtgaaggaaagcgaattaaagttaataataaaacaatcgggcaaatgacagcgaaaattatgttcaaaacttgatatataggtaaattcaattgccaatactttccaaaagcaagaaaaaacatcggtttacgaaatttagttaagtctgacttagagtcgttgagtaaatttttaacagcattcgacgcagtgtacatcatatgtcgaagtgaactgggcattaggtgattaatgtcatctttccttgtatgataaatatctctattctcataaaaagcgatatctaagcctgcagtatgattgtgcattttctcatacacaatgtaatcagtttgacttcgaatgacacccctcttgaaaaagtcgttacctaatatcgaagcgaggggataatgatttcctttgaagtaggcgctactgacatgtccattgcttgaccgaaaaagcatcgcttttccacctgaaccggctccttccaaattgacgaaagcagtaacgttttttgagagtttatgggaagcaaaagctttagcaccaaaaagataatcctcctcagcattgtttatgtttattatcaaatctctgttcggttgatttttagcataatatcgggcaatcgccatcacagttgcaactcccataccatcatcagtagcaccatagccagtggatacagaatcaaaatgtgctgacaggagtatgggaaacaaatccttcgatttcccttcgaatttaacaagaatgttatctccttcaaaatatgtaagagtatcgttgtcagtcgattcgaaagtaatgtttgttaaagtatcatcgataactgtaatatatgattgatttgtagcttccagctctcgcatactttttagtatgtaggatcgaacatgttcattttgcttggaattatagggatgaggcaaacttgatatatactctaggtcattccaagctcgttgaaactccaaatcttttagcaaattaggtcctggaacttgggcaatccgtttccaatctaatagatataagataagcagtacagtgaatccaaaaatcgagcaggttaaactggactgaaaagccttagcacatatgcgttcaaatatatgccgtctagaatttgtcattacaagatataattcgtaaataaattaattaattaatgaagatttaaaggaatgtagattaatatatggcgttgaaaaaagcacgttggtagtcgatattgacatcagccaatctcagtattactatatacagtatcttctgctattctcaaattcacttaggataaaaaccttaggaagaatcacttgaatcatcggagagctcactacgcttccttttttccttcctctggttgtaaggctttatattacttccattcaccacaaagcaataatgtcgtgaatctcgcaattcacctttccatggcgatctctcgctgattccatcaatccaaccgatagttcttctgtgtgaatattcgggataaaaagaagagtcaaacttttcagtcatcagactcgtataccctgcatccttggctaaacctttcaaattccacaaagtgtaaggtttggtctccgctaaagttattacaattacgcctttttctgacagaaggaatttagatgctttaaaaaaggcaagaagcatttctagaattaattagcgatattcgagatatgtctcattaaaagtaataaaagctattatgaacggcgtttccaaatttattttttaaattatttacgaataaaaaactttaacttcaaacttactttgattatccaaaatgttgcggtcttgatccttaattcctttccccgagtgaggaaaattccaaaatatagtatcaaatttttgtgtcttaagctttttatgcagatgcagtttcgttgcatcaatttcatgcataacctttcccccatttatttctatttttgagatgtattcagcagcatctggatatttctgctttaaatcttctttagagtcatagctggtagctaacacaaacccctcagatgatacatgatgtagcaataatgaaaaagcaaacgaaaagttgccttctcccaataatagaaatctattgtttttttcaaatgggagtacatatcgctcagtggggcctttgttcttcccttttccaattttgtcgtttgttaaagaattctggctatttatacttgacgaaccaatagcattatttaaatttcttttttgaagacgtcttgcttctttaaaacgagcctttttccccatatgaatgaaaacgattgttttcaattatttggctaaagacacttcactactcgtggatacaaatttaggtgtaacccaatgttctcttactcgcttgcttaatctttaaaataaaaagcgagttaaacggaatgtaagaataaaaattttcacgacaaactagcaataagtaaactagtattttctcaatgaactgttttgatatatcctaatttaactcttgcttaatatatctttagaaacaaatatacatcagtttagtgaaatatacgatatatatggtgaaatgtttgcgacattaaataaataggttcaattaaactctataagaaaacttcaaaaaagatctaaagaaaaattaaaaacagaaaaaaaaaacaaataacaaaaattaattgatcaaaccacaaaaacaaaacgaaattaaaccacttgcccgactacctcgactccgtcctcaaatacataagacttatcgtcggttggagaaggcgcattcttttcttgctctagctcatggttgacgatgagctgtctttgttctgcaacttcaattgcgcgacgtctttcctcttcaaaattttcacgaattttttgcaattctttctccatttcttcaaccggacgaaacacctttcctgaaactttactatattcttccatatctaatttaaatggttattatttgagtactcacacaatgtcttaccaataggttttttaattttcaaagcttgattaacacgtgcaggatttcttctttcttcttgtttaaactttagttttatctgtcgacgattacgagttggaaacatattagcaattaaagcaaaatcagttccccactgtgatagagcctgccatgtcagtaaatacgagcgcaattcctccataccttataaaatttttcagtatccatagcgttccatttctcaggtttctgcctatttccccaagtagcacttgtaacccgacgacttaaagaattttcttcaacgtattcgcgttcctctgctggtacaaaatcacgttcatgacggtcgacttctagtgaggtttcatccagaacaatttggccattaacaactcgcgtacgaggagttgcagagtaattggagttgttattcaaaccatcaacttccattttatctgctaactgatcaagaatagactttgttgggtgagagagactatcttcgagagaagcagactcatccgtaccctcttcttccaaacttcctactatttcttctttctctttcggttcgcttgattctagaagactggcactcaaaggctgtttgatggtagaatctaaagacgcttctcgactagagcttgcagtacttgctccttgttttttaatcctctttgctcgtttttcctcaaaaagcattttttctaattcgataaatcgttgacttttgcggccaattccaggatcatcacataaagcagacattttggtttcacttatgttaatgattttctcgtcggtacccacgttttccaatatcaattgactttttcttttcaaagaagattctatgatgttattaaataatgcattttagattaaccctttatttacgtacctctatatgaacggcgagacttttttgtagccggagaatccgcctttccgtcactaacagcactgagctgagaaaggggaatgttctcatcaaaaaacaaatctaattccttcataaattgctgttcggctgaagaggataaatcggtttcaggcgacaaatgctcaatagcatttaacggctgctcaagaaccgttggcttagaaattttaaaagtaggatttgaatgcaaaagtttttcattttgtttcactgaatcatcttttctataggatgaagctgtgggattttcagttgcctctttgtgaactactgtttgcacaaccggactagaaatatcagcattggcagtatcacgagacagctgagcggatgtttctacttcgtttcctgtgaggggttgatttttttcttcatgaacaacctctttttggtccgatactttctctctacgggctgtaaatttaggggcaaaccttgacattgatttttctggtaaaacattagtggaaagccctactacttaaaaaaacgtacttgtaggtgaggttaatatttgcgagctcattgagtctgtttagactgtaacttcgactcaattgcatgaatttcaaaaattatgtggcagtgcgcatatgtttgtacaaacatttgcctgttgtccatgaaccagtaatattttaataaagaggttatatcctgggtataactgtacaacgaaaccaagcaagcccgtctgaatagattaatatatatgtgtaaaaagttttatagtcgcaatgattgagtaagatataaaattaactaaaggtagaaataatcagggtcagcctcgaacaaacttagttattataaaacgctggaaatgtaagctatagtttacagataaagcaagaaaatactttacactaatatgaatagtagaataaattcagcaatttagataaccaccgaaggaattgaagaagccattgtcgttagctaatgtttattttgtcattgccaatattaattatattatacaaattactacttcgtaggcgactttaaagacaggcataactaaggtaaagaaacatattattatagcgaggaatctatttgactcactaacgagacatgactaccatgtacagataacctgaaaaaactcattaaccgtaggaattggcttagtgaatgttaatgagcacatattttgatcctaagtactttattttaattataaaatagaaaaggaatttttttgaagtggaatgagcgttgtgaatgaatcgaggaaaagaagacgtcttattcacagcgaaaaagaaacgcgtcgtttagacctcggagaagaagatgacttagagttatttcaaaaggaagcagcttggcgaagatctagagagtatgagcatctcactgttttggaaaagaaattatacgagtattgggaatctctagttttgaaacttgatcattacgttgctgctgctctggaaaatcatgaacaatcatttgaagaactagagaaaatcactgcttctttatatcaacctgatgataatttacagacactagatttgtcacttgctgagttcagtttaatcaaagatgcgcaaaactatttgaataagtatgcttcctattttcaagcccatgaacctactctacaaaagttagctaaatttggttcttttaaattaaaagaaactccaaacgtccatgaatggatagaccaacgccaggttcattttacaagtatgattaattaccgtactagccaacttaagttggcactcctaaaaaggaaactttccttctttcgtgaagctttgaattcagctgaattagaatggaaacgggtgcagcaagatcagcttactagtgcttccgaaagaagtattgaaaatatcgctgatgatatccctgcttcggaaccaaaagcaattctcgaaaatggggaaggatgtttaaatgataatgataatatttcaaaactaaaaaacaattttcaatctcaagctgatttgatgcaagcaaatataaattccaaattggatgaactttctcaaaaatcaactcgtgcagcacaattgtacgtcgacattatgggtataacggatgaaagagtgagtagagagccccattatttagagctgaagggggttctttcttcaaatgaagagaaaatcgaatccattaatcgggacctctcttcattgtttgaggacattcagttttttatttctcaacggacgaaacgacagaaggatattattgatttaaaattggcatgtgtaaaagagaaacaacaacttattaaaacccttgaatcatctttaacccaaattcgtaacgaacgagactctctagtggcgaaacaacaaatgcaatatactaacaatctattttttgacgatatgatgcttttattaagcaacttgtcaaacgctcgggttgcaattctagaaggttattcaaatcgattgtgcatatgggatcgtattgaaaggtctaagactggtgagatgaataatgtcctagatgaaaaagaagaaatttctgcgtcttcagctttggaaaaactaataaaaaataatagttgtttggaggctgaactcccaagtatgtatgcagcatttgatcaatcacaatctcgtttgttgaagaaatatgaagaacttgaaacgaaggagaaaaaagctttggaaatgcattatgaaaaggctcgtgccacccaaaaatattttgctgccatgaaagctcgggacattcttatgacagagaagaaaactcttaaactggccgaaaataaagaacatgattatatagggaagttgcaagagcgagaacatgcgctaacaaaatatgaatcctctttaaaagctgaattggaagtttataaacaaataaaggaaatctacgggaaacactcggtcgaagttttaacagaagataagcacttacaagttaagcaaacaaaacttactcaaaaacttgaagatcttatagagtctgttcaaaaatctggggaaaagcttatgatcatgcatcagaagttgtttcatttgcaagaagagcatactattttatccataaaagcttcgtataataagaaagagtctcatcttataaaccaggcatatgaaacacaagaggctcaagtatacaaaggaatgttaaaatgctccgtgtgcaacttttctaattggaaatctaaactcattccaaactgtggtcatgccttttgttctaattgtatggaacctttttatgagcataaaacaagtacatgtccgcagtgtgaaacacctttttcggtttccgacattttgaccattcatctttaattctagatcatcttttatatgattaacgtaatgtttttgttattttggtacataatatattttttggcatcaatagttattgaaagaatagtcaatcctatatacatatatatatatatatatatatatttatttatttatttacatataaatatgtatgctttttttaataaaaaactagtaatatctatcaatttgattaacttattccattaagcaacttcgttcattcatatgctagtttcgcaagtctagcatcatgactcactctccattatccatgtgccaaaaatagagggtgtgtatctgtagcgactgtaactagcgaaataggaaacaattaattactattaattatttttttaaatattggtaaattaatttatattggcagcggaattataataattcatctcattttctattgatacgcgtgcaatcccattgaacaatgagtctggccgaggattggattgatcctaattcttctgaagattcagatattcaagaagatgcggaattggaatacacagctgataatcccgaaaaggagcaaagaggtgtattttccttagagaaggtgcaactgcagttccctgtttcaataagatgccttgcagtcgaaaataacatccttgtaatggccttgactagtgataaattaatgattgttgatttagagcgcccagaggacattataggtaagcacatacttaaccagttttcattgttcttgctgaccttcgttagatattgaattgccaaaaaaagtcctagcacttggtttaacttataaaatatttttggatccttctggacattacatttttgttactacaactgctggtgataattgtttattcacaccttcacaccaaggtcgcgtgttgacaaagctaaaaggtcataccgtggaggctgttcaatggaacttaaatggaggaaatattttagagttattaattgcatctaaatctggagttcttttagaattagtactcactttggacagtgctaatctcaaaagaatcgaaaagtccatcaataccctatattcatttccatttatggagtctccaatgggaatcttaaaaaacattcaggatgattcaatgactatagttaccaacaaacggatactgaggttcgagccaaagacatctaggggcaaagaccaattgtatttttctcctgcttttcaggggtctatgaagggtacgtttagtttttatacgattttatcactttttttaacatgatttaagaaatactttcattttccgaagaagaaactgcccaatgcttctcatactctccatttccaaaaaatttagcggagccttatactttagccctaaagacgagtaaacgaattatttatttagatattatgaatcctgttaatccagatattcaagattatgaatttaatgaatctcctaagctgtctgtccccactgtggaaatgaatatgattttaacctcatttcatcttgcttttctcgatctcgatactctttacattgtaaatagagttaacggaaaagaatcatatcagcaacgagtcaatctttctccacatgaagagattttggggctttgttgtgaccatgaaaaaaatacatattggttgtataccaccgatagccttcacgagctagttgttaacaatgaaacaagagaagcgtctcttgtgttcttagagaaaggggattttgaaaaagcacttgagtgtgcgaatactgctaaagttcggaacacggtattagttgggtatgctgaatttttaatggaacacgaggaatacgagcgtgctgccactttgtacgcagaaacgcttaaatctgtggaagaggtagccttaaaatttattgaattaaatcaaaaggatgtattgaggctatatttgtggaagaagcttcgatcttataagagcactgtaagtcaccaatacaaaaaactttaaatttctaacataatatattagatgaaaattcaaaaatcgttgttagttaactggcttttagagttaatgctggccaaattgaattctcttgatgaaaaagagcgtctcgaattatttcctgaaaatgtaatgcaacagcgccaacaggttcaacgggagttttcaactcttcttaatcaatacaaagatgagataaatcgtgaagcagcttataatcttgctaataactatggtaaggaagaacagttacttcaaattgctaccgttatgaaagaccagtcttacataatgcactattgggtacaaagagagaactatgaaaaagcgttggagacattaaatgaaggcgtcagtcaagaaaccctcattcagcatgcgactgcccttttaactcatcgaccgaatgaaactgtcagcatttgggaacgtcaaacagatttggacgtacatgcattgataccatccctcttgagttataatcagcgttctcacgtaccggtagaggaaaatgcggccataagataccttagatacgttactggtgttttggggtgcgtagatccatctattcataatacattgttctgcatttacgcttgtcattcgagttctaatgagtcttacttaatgaattatattgaacagcaaggaaatcatcctttgtacgatatggatttaggaattcgattatgcttgcaatttaactgtcggagaagtgcagtaaaaattctggtgcttatgaagctgtatagccaaggagtggaattagccttagaagcagatgattgtgaattagctgctacgatagcaaatattccagaggaagatgttgtgttgaaaaaaactttgtggcagactattgcaaaatatatgttttccaaaaaaagtggaattaaagaaaccttgagatttttagagaattccgaggttttacaacttcccgagcttattcgcctattgccagaagatataaaactggacgatttaagtgataatgtgtgtgatgaactggatcattgcatgaaaagaattgaacagctggacttcgaaatcggacaagcatcagaagttgcgcatgaaatacaaactaacgctgaaaatatgcgtaataggtacattgttttggagcccaatgaatcatgctggcactgcaaccaacctcttttttccgaaccatttgttttatttccttgtcagcatgcttttcatcgcagttgtatgctagaaaaaacttacaaactggcatcagaaaaaaacattttgaaagaatgtcagttgtgtggtccttcttatgctgtaagacttattaatgaacctttttcgacggatttttgagtgccatttaaattaccattattatgtgttttcgagtcgtttattgcttgcaccgaacagccttaacgaccttgacttaaacagttttagactcaatgaaatttatactaatgactagttttttcactcatattgtctttgacatcgatctccctagtcgttaccacccctgaaaaatttgatatttctaatataatattagcattgaaattggaagctacaacttcttatatctagaatttttaattgtttttaaagtgctattcgttttcgaatcacgactaaaagtcataattcttttctcatatatattcttaaaccggttatattgttttttgtgctaatgagtagaaatagctcacactccacacggtaagcgtgcgattttaaaataaaaccaatatttttgaataaaacccttggctttcctttggtttgtctgcaaacgtaaggcgagctctcatattcgcttcaggtgaccggatcttccttcgtgaaccatatgccgcattagcgtatccagatcgtatttcagtcccctttgaactaattttgaaaaatttattaaatcaaaattgtacggatattaaattagtagcttctcgatgattttcatgattctaggacgatcaaaggagttcattctgaaattaccgatatggacgcaaataataacttatatcgccattctggtgtatgcactttccttctttggaatatccacgggggttctgtctcttagctggataggattgttgcaaaaaaggcagcgtaagttaaaattccttggtactttaattaataacggagagagtagtgtatgaaattataacttatgtaactcttcatctttcaatgttgcatattgtatttaactttgtatccctgttgccagcaatgtctcaatttgaaaagaagcaaggcactttggcgtgcattttggtgacggtcattccttacactcttttcccgggtattatgcatttaattgtctaccattttttcttgagaaaagattacgtttctattgctggacttagtggatgggcttttgcttttatctctgcttcctgtgttcactctccacaacgattgtaagcatttcttataattatggttgcagatgcatacttccacacgtcttctttcctcacaatgttaagaaacaacctggtttgtatgattttttgcaaacgtcgaacctctcttgtcttttaaatgatggcggtttattaacttattttttagaatcagcttttttaatcttttcagcattcctgcatattgttttcctattatttacctaattatgactaccatattggttccaaaagctagctttatcgggcatgcatccggagctgttatggggtattgtactcctttcatgcttggttctatccccttaaaaagctgggctcaaaatgtggacccaatcttccagtcttgggtaaaaaactatcactcttttgatcaactgtcgcatgctcaactccccattgcggaacctctgtcgaccttttcttctttccccggaaaaggaacccgtcttgggggatgaactttctgtcttttacttcttttctgttcttcttcgtatgatgatatcctaaatgtttgttttctttattgcaaagggtggaaaagctcctctcaatgaagagatcttctatcttttggtaattcttattcagtattttctagtcagtcgtttacaggtttcaatcataaagattgtttcattcgctatatttgttctttacttgcacggagttagggacaattagaaagtattttaatgtttaataattctttatgattaacttgttttaatcaccactgtcctacagcggcagtgtaaaggacaaaagctgtacaatcaaaacaccttgaaattgtaatttccgttattctttggaaactagcgttttacgttgtactctcaaatcataaaacattaaactgtaaagacacagtgaaacttatactattaacaatggaagaatgggaaaattaaaataatagcagaaaaagtgaaaaccattgctaatcggttatcaagtatcagatgtttttattaaaacccttcatacaagttggaataaccggtttttataaataagagaaacaattcctttcggataaagaaaaataaaacttgaaaagtatttccctagatgaaaatcttaattaagtgttgtgggctagttaatttgcttgcctatgtccatcatcctttaagcaaatactgttttatcgacaagtacaagagatcgagtaactcgctgtattgtttcgagagcagcgcgaacgatgctttgatcagaagggggaatgttttcaacagaagagggaactgaggaagtgttaggtaaaggagcatttacggagattacgatatctgtttgaaagtcaatcaaagttatcacattcacgaagattgccacattggtagcggattcaggatttcgctttcctttttcaaggaccctctgacaaccttgtacagaagatccactagccttttcgcttctcatgccctcaaagtcgtcttcaccaagacttttgtctctccaaattactctttgagatgcatcattatcgaatgcaatgctattgaaatggtaagctgccacacttccatcaaatggcttctcaattttttccaaaagctcaatgatcactgttaggttttccttggaatcttgcaaaaacacctcttggttgtcaggaatctgacgcaaaacgctagcatcgagaaatttaggagggaaatcagcacaaagagccccaccgaatagctgtaccattactataaaaatataaaaacctaatagatttgtttgtctcaagaaccagattggtattcgaaccacaaaaggattctttcctattttcactccatttcattcgactgcggtaacaagttagtgcgtgttattttatgtttcattattatatttatcgctagtaaaacgctttaaatgagcctagattcaattttcaatatttacgcactgcacggtaactactaaactgatttaaaattaaaataaaaagaaattcaaattgatgatttttaatgaaaatgatatgttaaaaataaaattttgtacacatatatagtttctaatatcgttttgacaactagtatatcaaatggatgaaaggacgctcgtaatcttgtaatcatgagtccattcagatatccataactaatacaaggatagggcgtctgataacttttacgattaagttgattagttgttcagccttccacttgtgtgatacaaaagagaaatggaattgcacactagagtggttatttcaaactttctattgatctgaaaaacctaaattaaacgttcactagataataagtattcaaccaaaagatcaatttatgtacggtatcataatctacttcaatacttttacacaattacatcaccttatattttaaacaaatatccattaactgaccagcaataatataggtaaaagttttgtgaaccaatgggaattcttattcatttgtatatagataaatgaagaaatgtatatatatgcataaaatcctagcccatcaaactgtaacctgaaaaggcttgtaacaaaactcatcaatctcaaacttgtaaatggtgaaatagcaaatgtaacgtagatagaaagatggtatgagtaaaaaatgataaacggttaaccctttagctttgcttttatccttcagagctcaataactcaagtcgaagagatgggaccaagcacatgctgaaatgtatgaatgaaatgagtgtaacaaataaaattaataaattgctgagatacttgacgaaagctcatcagaacatcagtgtaatataatagcgaactagcgcatcttttcaaattcattttaaatgatttttctaataatcccatctagtaagtggtattgaattcgaaatggtatctgtcgtaccagaaagaataattagcagtataattcgtgtcccttggttgaatgataccgctaccaattgaagagttagtttggttccatccaacagcacccttggcaacagcctcagaagcagttaatccttggcggatttctgcaccagctgccaatggaacaataataagaataaggaatattaccaaaattgaaaagtacaaggctgaataacgacgaacaatacgtttccgcagtctattctgcttggtagagaaaataggaggacgaatttgacgacttgggcgcaaccagaaaagaagaactgaatgccaacgatcaatatatgggatacaaatcacaggaagcataaaaaacagtaataagtgacccaagaagaaatcagtagcaaacaaattaagttctatggctttacagacaaattcacgagcaggcaaagtaaaggcatgatagccatatcctttgccataccatttaccactccaccaagaaatattagcactatcttgtttgacctcacgagataaacataatagtgttaaaattttgaagataaaacgatgaattgcagtaacagcacagaaggccaacacagtcttgggtaatgaccatccatcaaggaaccagcagacttcaaaaatagcaatgaagatgaaaatttggatcgtgtgggcaattgcagcaaaaatagatggaaactttttacagcacaatccaaaggctggacccaaacaacaagccataccaccaaagaaacctgacataccaaagcctgctgcaataggaatgagagagataataacaagtcgcaaaatgggattagtacctgtctttgtgtcatgaacatatgggcttggattatttggatcagtgataaacatgggatttccaggctgagaattgataaagaagtaagggataatggcaccagcagctaacaaggcagggattaacacatcgctaaagaaaacattcgtaaactttgctcgtggagtatccattgaaattttatcgcttggttgacctagtaccctacgtttgtaaccagttattctagtgcgggttaatcgacaatatccgatccatgaattggcatgagaacgagaattacctctcgaaagccagcgaataaactctctataatcaacaaagaaatcgttccaatcaaattgatgaggattgaacaaaaatggagcaacacaaagagccatgattgacacccaccaatagatcaagtgcgcaacccaaacagtcatagtaccaaacaacaacatcattagaaatctagctccaatgtaaattgaagggactgcaaagcgtgaatacaagatggagaaaggtaaacgagcagtagcaaaaccacgaccagtaccaatatatctagcaccgccgtatgcaagatccgaggtaatagcttgagagtacacttggcaggtaaaaacctcaaacaagggggagaaagaaccaatttgcttgaagaatctttttgtagctctccaaacaccacgttcaattaattcatgcacagtaaggggaataaacgaaatccaaaacacaatgaaaattgaaataacacatctcttcagccaagacaaaacgggtcccaattgataacaaccacgtggaacgatactagtgtcgtaactaagcttttgattaccgttgtaataacaaacagtgacaacgtgataaattgctcctaagttgataaggaccaccatgaaaagttgaacagaaagcataataaacatattgttaagatggaaaccggggtgagcaaaataaaaagaaaggaaacggtcaagttgaagctgcgtacctaagtaataatactcacgggataacatttgttcacccataccagtaccaacttttgtgttgaaattcaaaattgagccaaaacctaaatcacgacctttaccacattggaaatactcgcaatgcttgatacgtccaccgcgaagcatagcattcataccagcataaatatcttcgttgacgtgtaaacctttttgagctttagaaacaccgccacgtgtagtcataaagataccgttaagaaaatctggatgaccataatgaagtttaccgccaatttgcgcaagtgtacgagagaaaagagtaccgaatgtttgttctttgcctgctgcaacgtcacccaatataccaatgttctcagagaaaatgtattcacgagcaccaagaatagctacaggatgcttatttctttcacgagcactttcagaataggggttaacattgtcggtctccatttcttcaaactcagcaagaacacttcgaatcttaaggcactcttcaagataattatcttgattagcatcaataagttgaatatattcaccacgatagaatggtaagctcatgttttgattgtcagatttaccatcaccaagaataggattaccagacaaacgaatacgatatttcggacgacgacgttcattttccataatttcagagtgaccgtcaatcaaagcagcaaacaattgaggttccgcaccttcttcttcaggaggatcttcgtcaaggtaagcaatttgcaaatcaggataagccctgagaagaaattcggcattttcatactcttcctttgtgaactttgcataacgttgcattgagacaaccaacttgaattttcgacgagccatgcgatctaactccctttccaaacgatctgtgttaccaccaaacatttgaacgatttcggggttttcaacacgatataaaagcttgatagctctgctatagttcataaaaccgctgatagtacgatacaacgtttgacttcttaaggaagcccaaatacgggtacgtaacgtatactcgggcatagcagatttgaaaccaatacagtaaaaaggaagatcatcaactttacttttatatgtaccttccttttcagagacagaatcattttcatatggagcattttcctctaccagaatcttagtatccttcacaaaacagtcccattcaacaggatgaagctgtttcaaatattctaaaagggtgacacgagacaactggtcctcttctctaatgatttctcgcaatgatagaagaattttctcagcataatgaggaatcaatacagtgaaagtaggcatgttgtcaacaggtactggttctggaatgggagtagctaaagattgtgcaaagaaagaaagacgacgctctgcctctgaatttgcagggaagaaagtagtgtgaacaatattatcgtcctgagagacaaaaaacgtaggggttctaagagtcctacgtccttcttcagctggaacttgatgatacagaagacgttgtacatgatcaatggaaagtaaatgttcacgatacatagaaatgacaatcgcattccaaatttgtgaaattaaaattttaggtttgtacttaatttccatgtcattcgtggccaaaattttaccataaattctttggggcatacggctaaagatatttctccatggtgtgaggatcgaaatacctaagacgaatgatcttaaaacagagaagatagtattgaaaataatataccaaaggtacgtatccaaaaagaagagaatcaagtcagtaaaatacatgatacccaaaatgatccttggttggacaaaacataatctgctacccgcccaataaatagagcaaagataaggtcgcatggtactcaaaacaataataggatctctgatagacaaggtaaggaagaaataagattcagcaaatttgcatgtgaaaacacagacccaaataataacagagagtgcttggttatcaaattttaatggtgcaaaatttgaagtgaaatacttgtttgccaagtatttacgagaatctttcacggacaattttccaaatgtactttgtagaggtacaagagaaaagtagacgtatgtagcaatagacatcaaaaatgcaactacaccaacagcgatacgtcgaccactacgctgttgatgcttacttgagaaaccgaagatatagacgataggaatcaagttaatgatagcgattaaaacaatgatacataaacgcttccaaatgggttttgatccagggaaacgacgggggacaaaaagatattcacacaaagaagcagcagccatgataatacaagaaacaacagaggtacaagcaacagcagcccattgggaagcacctgttggcttgggaccatcgcgctgatggaaaggttttgtgtaaagagtaggagagttgaaagcagtaaaataccaaaacataccaaagtggatgacccaaatacgattgaaattggtaataagatgaaaccaagaacgggattcataataagttttataaaaagcacgattccattgaacttctggaagcctatgaaaacgctcagaagcaggaatatcaataagacgagtgccgtcttcaaaaataagacgtgctataccctcagcatgccagaaaagttggttaatatcatcgtatccaattaactggtcatgtggacgttcccgacgtacatatttcccattgataatttcaaactgctgatcgtgcatatattggtagagtggggaaacaatattatccaagtaatatccttcaggaactggttcagtgacgttttgtgcctcaggtgaaataatataatcgtaagcacatttgaaaaggaaggctattacctcaggcatgaaacgaacattgtttgcctcaccccacaacaaaagccacaatgcaatttgttgagcacgctcgaattgagtcattgagcgcatgtgagatctccaacgatattcggcggattctaaagaatcatcggtattaacatcaatgtattcgtcttccgcctcctcgggttgctcctttttcttcttgcgcttgaagcgagacttccttggaggcttaacaactttaggggcttttttgtttcgagaaaagaactttcctttctctttgatagaagtaactttaccaccataaatgccaacattagcaagaccgactgcatcttcccgatccatctgagaagcaaaataccattttttatagttagcaatatcactaccaatataatcggcatgaagcgtaagcagtgcttgatctggagtcatgcgagaagcacgagaatctaaaagacacataaaaaaatcatacatattacgcatggaatcgcgttggaaacccaatttattggttagatcaatgaatatgtcttcaatctcttccttagttaaagggagttcgttttcaggagtccaggcaggataaggctcacgatttgtgagattagcgctatcggcatagaatgaaccactatcgccatccaatggggtacctgagcccgaattaccaacaaaagaagagttgctaaaatcatacggactgctaccgtaaggcacactgttgtagacgttagccaacgaatcggaactaggatcataagcgttgtatctaccatcgcctctcaaattgtaaaaattgttggcatctgagggctgagcattgtaatctgaatactcagactcgtattcatctgaaggacgagtaaattttcctttttcagtggaatattgattgatacctgaagaggcggtgtcgacaggagtgtattcatctccataactttcagttacaccagtagggtaatcatacccattgtaaccctctccatacatagaatcgtagtcagcctgatccaaaaactcctcattggaatacgcatcagcaggctggcgttggtatgcattttggtcatcataaacctctgaatcgtaagcgtactgatcatccgagacagcatcatgaccagtaatacctgaaacattttcattatttccagacattttctactatgcttaaaacttgtaaatagattgaggaatgaggactaattagaaatatggtgaaaggagttcccagttaaagaataacgaacagaaaaaagaaaagaatgaacaatttcaataggaactgaaaagagggactgatgacttaatgcttatccgctcttgtaagccaaaatgaaaaaagaaccaattaatggatggaataaaatatcagaaaagtaaaggaaaagaaatagaaatacaaacactaaaagagaaaagcttcaacaaacaagataagcaaactccgtgaatgatcaaagtgacttatctaaaagaaattcactccgttaacaggttgaaatgacgataaccgtatgtaagggtggataagcgtcaagtttataaatggcgatatatgggtagatattaacgaaagaaaatttctaaaaaaaggaaggaattccctgtaaaagactgtaatgaaaaagaaagaaaggaaataaaggtaagcagatgatttgccaaagctttgaaataaaatttaagtaagacaaaatctactccaatgcgataaaatatcaagaaagtaatgcactaacagatgcgtgtaaaacggagaatgccacaaatgatgaacccaaaatacaagagaaaggaatatacaataaattttgaaactcggaaaaaaccgaagagctcttaatttttttcacgctaaaatcactgtataaaaccctttgcaaacagtacgtctattaagacaaagtaaagaaggctcaatggacaaagctcctaaataccaatgtctgtcgattcaacagatgaaatgaagaagccagaactttaagaaaagaactagatgctgttgattcttggggataagataactttctctcagtctttttctttgatttagatataaaaaaacttcaagggcactccaaaaagaaggggaggggaaagattttttttaaagcgggaaagaagcgagaagaaaaaggctggtgggtataaacgaggagtatccgcaaatgatcgttattatatgaaattagcaataataataataaaagagaaaaaaggaaaactttgaatctctcaaaagcaatatgaaacgaataaaagaccgtcaaagttctttttaccacaaggtataagaattgaataacggggaggtaaaagaagaagtagagaaaaaaaaacgatgaagcaaaaacaagtcggaaaaaaaaaccgatgcctgtttgttttcacaatcaaggaaaaacttttgttgcagtccagaaggcaaatggggtcttgctcttttttcaaaggaaacttgaaaaaagcaggcctagttgcctcacacgaaggagactttaatcgggagaaaagagaataatttaaaaatacggattgttaaacagttttcccgatatgtgaatcctatagacgtttgttttcaaccaaacttcaggactacgcaaacactttcgagatgtgttgttggcggagggtagtgtttggttcaggagagacggctggcgtacgttgcaggaccaccatataaatcttaacgaaacacaataaaaatacttaaatattattaaaaaactaatatttaaaagggtgactactaagccataaaaaccccaatggagaggagtatcgaagtagtaatcagatgcaatttttatcaagacaagccggtccttttataagcagcgtagttggtcttgctaagtaattcctaatgttgataccagcagctcgcaaaatatatgtatcaattaatagaaggagggatagttgaaggcaagaaagagactgcagaaaacatgagctattgagatgaataaaaaaaattataaagttaaaaaactgaatgggtgaattacaaaaaaaagacaagaaagtaaataattaaaatttgtttgatataaaaaatgagtacgatggaagtaaagttgtcgaataatcaaaaagaaaaaatatctaagcaagagaaaaatatgcaatagaaaaacagatcagatttttttatttaaatcgatcgtctttcatgaaaaactagctaatatttaaatgtattttattcaaaccctctacgctttagcagcattagcggaacgaattacgtttaccaacattaggaatgtcttttcattcaatttgcacacttataaataaacatcctgctgctattttcgtacaatcctactatgcacatgctttcgagcaaaaaaaaaaaataaataaattaaaattaattaagttaaccctacaatagaaagtgtaatttttcggttttcactatagtgaaatttttagtgacggtttcttgccatattgctagaatcgtatgtaaaatactggatatggtgtgggatggaagaagcaagaaggtggcagaagagaaagtagataagaagaatgggatagaatataatggaatcaatgtgtcattggaaaattctttaatagttcttttacgctttttttttctaaaaagcttcgaggtgcaacatttttctttgacttactacctagaaaccaaaatgtaaacaatcggttatgtacaatgtaaacaaagggaaatttgttgtaaccattgatcatcctctttgctacaccactgattgggaagagctgaatctacaagtaacgctgtaccattatttctatgacaaccggtaacgggctccgatagggtaaataaacaaagctcgctacgagtaaacaattggtttgtttggaattggcatatgggaccgataatagcggctggaaaaggaaacggtagaaaacgtgaaaagtatatgaaaagagcaggctagatgagatagcaaaaggaataatgggtaagatagatggaagaatagagttgagcggggagaaagatttgggtggtgggtaaatgaggaaagaaaaaggtcgaattattggaatgcaaaggctgattaagcgtaaaagttttaaatcctttttcaatggcgcaaaaactagcctggtatatacatggatgcatattaccaagatcctataaaagtccatttgaaatttcgctcttttttggctgtcccttctactagggaagcggccaaaattcctatgaatagaatggggaagatggaaaggcctggttccttgatatagcgtggtttaatagaatatcctagtagaacattgggtattgccacagaactcgcaatgcagagcggtggaaaaataaccgtgtacgggaattgaaaaaccattgatggaaatggatgctacggggattttggaatgcaagcaattatagcgaagaaccggaatcacattaaaaaatctaaaaaattcatcaattctccttaattagatactatacattcaatctctccatgtattcaaatctcttaaattgaattcgtctatttcgccaattgtcaattacgtttccataccgtacatttgaagtaacgttaaaaatattttaaaaaaacaaattcattcggttgcatgttccgattctagtagaacgatattatttgaaaatggtttctttcttctagtctacgaattaccgattttttttctcgtcatgaaatcgcccgccatcgggaacttaacgaatcaattgtactatagcgtctcggtttaaagacggaaaggaaattttagttggtttgctatcgtaattccctgccaaaagcaatgtaaaacgggaatccgagataacagcaaccctgggaaaatcactgtttcctataccggtttctacaacattattctataacattatccagtgaagttaagactagcggtggtaagttaagtctcctcattgtttacacatcgcctttcgtcctgaatgctagcgaatgttttcaaagaagttgatttatggaaatcgctagacattcaaactgcgtagtataacaagcagcgtcggttggacgatacattggcggaaatttcaaaattaaaagaatttacttctcttgctctactacatttcctttttatcgctttatttttctaataaacctctattaatgctctttatgcatacctttcttgttaattctatactacactaatcttattctatcctaattctggtttcccgccaatttcaatttaatatgactttatgcaagacaaaaggccgagactttatccatgcaattgtttaaaatagatcagacatacttacatataaacgcttccaaaacaagcttagcgaacaataacttagcttgcactggtacatcggaatattcacgattattactaaattgccactcatccctgattcctgtatgtgctaaaatttcaaattactttttatcgctacattgttatgtgcagcctcggatgataccgactataatttgatactaactagtttgtaatgatggcattcaaaatgttagcaattcattcaccatacctgtctctactagtgtatgtaattgtgagtctaataagaaaaatatgaaaaccttaatgagcatgacactttgttttctgttcatcacactcatcaataattcaatgggaaaacgaaatgtgaacggattttaagttgctggaatggtaaaatgcgttcattcaataatgtggaattaaaaaaaaaagacaagaaaataaaaacttacaaatttaaaacatacttcataatccaaactattctatttttttgtgatttgaaaacgaaatcacaaattttccttatacgaatttacaatccttgtagaacactatgtaaagttaacgtagtttacaagaatagtgtttttttttggtaaaaattatcactgttgcgataaattaaaaaaacgatgcgcaacattactttaaaaatttgatgcgattcatgtaatacactacaccacaagtcgatacactcctttctccatctgcccttggggttcccttagtgtagacagttggcacttctactttgtatagtatcgctggcttaatttaggtattataaaagataaaacttgcttcactcgttaatactagaagttcggcctttattaccattttttacagcccaaaacattcttggtacctcagcctctgaccgaacgagaaagttgtatttaagtttatttacctttttcctctaaaactgcaaaatccacgtctctgattgctcatttttttttaatatcatgtctagtggatttcctcctgaagtattgtctcctcttttaaatttagttcaaggcctttcgtcgcctgacaatactgtccgaaatgatgctgaaaagtctcttagctcagactggataagtcaaagagctgacttattattaaacggccttgcgattttagcttatcaaagtgaggacccagctgtgcgctccttttgtttagttctttgccgtcgtatttcctttcgcaccttaccaggagacagtgagttggaagtgttctctagcatttcaaatgagtccaaacagtctttgcaaagtcaacttctagcttgctttgttaaggagtcagttcccactgttcgtaataagctttgtgacacaatcgccgagattgctcgatctatctatgattgtcaaggcgaatggccagaactcattaacgttatcttcaatgctgttaactctcctgatgagtcttttcgtgaatcagttttccgtaccatcacttctttacctcgtttattgtcaggtcaagatagtgctgttactcctctctttaccaccggtttagctgatcctagtatccgtgtaagaatatctgccgctcgtgcctattctgccgttattcttgagagcaaacaatccactcgagatcaggttattcctcttttacctagcctcatgaacatccttccccctctgcaacaagatcgtgattctgataatttggcggactgtcttatggccatcactgaaatcgccgaagttttcccaaagttattcaaacctatttttgagagcgtcatcgcatttggtcttggtatcattaaggacaaggagctggataattccgctcgccaagctgctcttgaattgcttgtttgtttttcggagggtgcccctgctatgtgtaggaaatcttccgactacactgatcaacttgtacttcaatgtctcttgctaatgaccgatgtcgctggcgatcctgaggatgaggcagaagaacttcaagaatggttgaacacggacgatttggatcaggatgaaagtgatgctaaccatgttgtcgcggaacaagccatggatagactttctagaaagttgggcggaaaaacaattcttcctccctctttcacgtggcttcctagattgatcccgtctcaaaaatggtctgaacgtcatgctgcccttatggccatctcatcaattgccgaaggtgctgaaaaattaatgaaaaaagagcttagtcgtgtattagatatggtacttcctttgttagctgaccctcacccccgtgttcgatgggctgcatgcaatgctgtaggccaaatgtctacagattttgctcctgacatgcaagtcaagtatccttctcgcatcctcgaggcattggtacctgttttggagtctccagaatcccgtgttcaagctcatgctgctgctgcaatggttaatttctctgaagaggccgacaacaaggttctcgaaccttacttggatgatatccttcaacgccttcttaccttgttacaaagccctaagcgatatgtgcaggaacaagccgttaccactatagctacagttgctgacgctgcagctaaaaaatttgaaaaatattttgatgccatcatgccgttattgtttaatgttctgcaacaagctgacggcaaggagtttagaacccttcgcggtaaaactatggaatgtgctactttaattgccttagctgttggtaaacaacgattccttcctgtatctcaggaattaatccaaattttaggtaacattcaaatgggtattactgacagtgatgatcctcaagctagttatctcatctctgcctggggaagaatttgccgtgttttaggaagcgattttgtcccatttttgagttcagttatgcctcctctgttggttgctgctacctcgaaacctgacttcacaattatagacgacgaggttgatgaaagcaaatattctgaacaagatggttgggagttcattcccgttcatggtcaacaggttggtattaggactagtacgttagaagacaagtgtactgccaccgaaatgcttgtctgctatgctgctgagttaaaagctgactttgatccttacgtcaatgaagttttgacatctgttgtacttccaggattgaagttcttctttcacgacggggttcgttctgcttgttgtaagtgtattcctcagttattgaacgctcggattttagctagcaatcgtgatccagctaaagtcaatgagctttgggagcctattttacgaaagctgttggatcatatacaaaatgaaccaagcgtggaaatgcttgccgactattttgaatgtttctatcaaagtttggaaatcagcggcttgaatctgagtccttcttcgatggaagcactcgttgctgccgttgatttgcagctcaaaggattcatttctcgcgtgcagcagcgtgaggaggaggctaaaaatggtgacatagatattgaagaagatgaggacatgattcttgcagtcgaaaatgatcaaaacttgttaaacgaaataaacaagacttttagtgttgtattaaaaattcacaaaactgctttctgccctttttgggaaaggctactaccgtacatggatggctttttgtctggaaacgacactgtagctaagcaatgggctctatgcatgatggatgacttaattgaatttactggacccgattcttggaactacaaggatcactttttgccttacttagctgaaggtattcaaagtagcgaaccagaaattcgacaagctgcctcgtacggtattggagtagccgctcagcatggaggagagttgtatgctgaaatctgctctagtgctttgcccgcattgtttaagatgctcgagcttcctgatgcccgtgatgaagaacaaatttatgccacagaaaatatttgtgttgcgatatgcaaaatttgccgcttttgtagccaacgtgttcaggatcttgacaaagttgtaacgtattggattaatacacttcctgtaacacatgatgaagatgacgctccttatgcttacactttccttgcggaattgatggaacaaaatcacgtggccgttgcctcacaaatgccaacgattattacgattttagcagaaacatttgcatctggagttttacgtggaagaactttgacacgtttgatggaagcttcgaaggtttacttagctcgtttccctgctgatcaagttaattctgtcattgccactttgagtgtcgataatcagagagctttgtctgcacatttttaaatttcatttctttcactctaagtctttcaatattttctttggttcctcaaaatgctttagttagtttaggttaggttaggtttttatttaatccatcaacaatcttcggattttgtttcactctttttagactatgccggctaggttttcacttattgctttatacattacttgatttttcatcgtattaaattatttcttcgtgtagcagctctttcgtgtataatacgttttgatgtgtggtatgattataatatattgctcgcatcttttgcaattaattttttttttaaatgtatatactgtagtcaaattgattttgctttagttataacctgtgagatctggtattttattgaaagtagcatagttaagcactatccaacttcccatcaacatgagctacaactccaatccttataacggtgggcaatatccaccatataatacatatactagacctaattattcaccaaataatggttctcaaagtaataacactgtacatcaatatcagcctccacgtatgccacccccttccacaaggcctcagacagacggcaattctaatcaaatccctatggagaatgttggtcatataagtttgagctctgcaaactcccatgcttatgccccaccctcaggtccgcctccgaatactggtgctaattcttatggcaacccaaattatagtgggcctcagctgccaaacactcagactcaatcttataacttagcaggaggaggaaactttcagtatcagtattcaacttgccaagggaagcgaaaggctttgctgatcggaattaactatctcaatacccaaaatgagttgcaaggttgcattaatggtacggaatgcgaaaggtcaagtaaacatatattaacttgtttaagatgtcatgtctatgtcccaactgctgatacagcgctacggttacaagcaagaagatatgggtatggttgattacgagaacatcttgctaaaacttttttagttattatgacagacacggcaagcaaccaaagggcaattcccactcgtcaaaatatgttagatgcgatgagatggttagtaagtgatgcccaacctaatgtaagttatatgtcatgggatttacttcctaatgctaactatttaggatgcattattttttcactatagtgtaagaatcatcactttacatctcatactcacatgcatagggccacggagggcaaacaaaagaccttgatggagacgaagttgatggttatgatgaaacgatatatccactggaccatcaatatgccgggcaaattatagatgatgaaatgcacgaaataatggttaagcctttaccagcaggatgtcgtttaacagctctctttgactgtaagtcagtgattttaatctatttttaacaaaatatagcttgtcattcaggtggagctctcgatcttcctttcacgtactctaccaagggcgttctaaaggagccaaatatgttaaaagaatctggtatggatgtacttcatgctggcctttcttatgcctctggcgacattatgggagctatcaacaacgtgaaaaatatatttaccagtgctaccaatggatttaataacaacgctctacagtactctagacaagttaagttttctcctgctgatgttatttctttatccggatgcaaagataatcaaacaagcgcagatacaagtgttaatggattcgctactggtgctttatcatacgccttccgtgaagtcgtcactcaaaatccccaacttagctacttgcagttgctgagaggtattcgacaagtactttccaacaaatactcacaactgccccaattaagttgtagtcatcctttagacatgaatcttgccatggttttatagtacactaaacattacttgatcattgaagttctatatttttgtagttccatcagatatttaaggaattttcaattaaggataaaatttaaatcacaacaactcaggaaatcatatctaatactttattgaaatatttttgtttgcaatttataattttgcttaaaaaacgagctcaaattaaaattatacacgcgagaaaactcatggctcttccagtccgttctgttggggatgaaaccattcagatttgatagcctgtttaacttctgtagcattctttatggaatcttcaagcgaatgtccgcgagcacagatataaaacttaagtttcggctctgtaccacttgtgcgaatagtcataattacctctccattttcaagctcaaacgttacgttatctgaactttttgaaactggtaaagtagctttaccatccgtggagcttgagtcgtaacctgtagtaaggtcgcgaacatttgtaattttcttactaccaagggttgccggataacccgattttgtgtcataatgtctcaaggcatcaaccaaagcacgaagcttgggagtgtcgcgtgaaaggaaatatgagttttgcgtagtgtaataaccatattttttagacatttgctcaaaaacctcggtaattgaaagattctgaagttgaaggcgtttcaaaagatgaaggaacgtaatcaaagcattaaccccgtctttgtctctaactatactacctaccatataaccaagagcttcttcatatgccaatccaataaatttcccttgtttttccaattctaatgctttattgcctaaccacttaaatccagtaagtgtttcaacatgatggaatccttctactttggccatggactttaccatagcactagagacagtagttgacaaaacgtaaaaatcatcaattggctttccaacgtttttgtattcttgaaatataaaataggcaaggatacaaccaacttcatctccggtaaatcttctccaagcaccattaattttttctgcaaaggcgaaacgatctgcgtcaggatcagttgcaaggacatacgaaataccattagcatcagcttgctcgtaagccaaatccaatgccccctcctcttctggatttggaaatttcacagtcggaaagtcagggtttggagaatcttgaagaggtacagaaatcatatcgccttgttcgccaaataagtgtaatgctgaagtaacaaatggtaatccaacgccatgaataggagtgtaaacaaatttcaaagatttcatttccaaggaaaagttgttttcggaatggaattcgtggagctgagaccaatagttttttaaaagaccaactgcaaaatcccgatctgctagtttatgattttcaaccaaatttttgtcccaagtaatgggcgttaagtttttttctatacatgcagcaattcccttgtcatggggaggaatgatagcacaaccgtttccccaatagaccttgtatccgttataagctgcgggattatgggaagcagtaatcataacaccagctgcagtccctagggttttaacggcaaaagggactaaaggggtatggacaagatgatcgaagaaatacgttttgaatcctttttgcaagaacactgcagcagtaagtcgagcaaaagtattagacttatgcctatgatcgtgtccaattaccacacccagctttgcagctgatggtacggtttgaagcaaatactcagcgaagccttgtgaggcttgaatcacggtcaaacagttcatgcgagcgaagccagcaccaatttcagctctcaaacctttgtaaacattagtaaatgaataaacgaacttgataatgttaaaacattaagatgtatagagagaacaatcgcaagctgaaaatctaattacacttaaaccaatttcgtacaagcacgttatataacattccaagcaaaaaagaccaaaacagatagaaaagaagaagaagaacgaaaaactctttctgaaatatgaccaatatgatcatcacaataaattagtatacgcagtaaggaaagtgaccgatgatcaagtatatcacttcgactctaatcaaggaaaacacaataaagtagtttaagctaccggctgtagcactgagaattctttattaagaaagaggcattatttagcgttctctttcaatccacttcaacttgcgaaatatctcttaacaatctcaattttttcttcttttgtaataaaaacataccagatgtaccaaatccaatccttggatgcataatttgcttgagggtggcataatcttcagccttaatcaattgtgaaacttcattcctcgtagtttcatcctaatgcgttcaatctgttagttccacagtacttccatagtaaatatagtcctaatacttacttgatctaatttgaaccactcatctactaattcttgcaaaatcggatccatcttgccaaatgggaattgttaccatttgtttgctacacacacaatacacgtatctcatcacctcgtttaacgcgtccttacgccgtggtatttcgtatccgttttcttacaaaaatgattttaataaaatagactcaaaaacaaaaagtagtaataatattatactcatgacctccaattattctagagaatttcttaaaacattagctgcaaaaagaagcctagtaatttgaaagcagcagttaattacgatatataccgcttacaaaaaggagaaattggaagaattcaagacctgacgtcaattcgcaagctgaatcgttttaattaataggcgtcggacaatgggattcacttaggcttggcgacgttcttgtctaaaaattgcttgtcggaatgtgtcattgaaccgaaaaggtttgaagctcttgactaataaacaacagtaactgatgttaactttttatagaatatcccaggtttcaattcaacacgtttattcataaatctcaatctatgttatgcagatgagattgaaaatcaataccatcaagtacaacttctctaaactgaacgggttaagtatggaatggtttaaagttttaagtactggatcactccaagctttgagatacgataagaaaattagtgttagtacatttgtggctttaatcacaccttttccataaccaggaactaagttttcaaagatctactattcgatgatgaaaaaatagcattcataaagttgataacagcatacataaatgaaactgaaatattgaggaggtaaggcaaacatgatgaccatagtttcaattgactatgtaatacgtactatggctcattaaaacctatcaaagaaagagaaatacgaataagaggaaattcaagcctgtttagaatgagaagagaataaagattgggttttggcgaaggatacgctgttgcattaaaacagccttaaataggttctataaatggttagcatgtaaaaaaaattaaaattgaatcatgaaaaaatattaaaaaataataaaaaaacctaccacttaagagcttgttcaaattgttgagacgagaaccaacactgacatcaagaatattatcaccaatttcaacaattagtccaccgatgatagaaggagtaactttattgctaaccagtaatttacccttgccatatttcgatttagctatccgagattcgagacgagaaaggatcttcgaatctagaggagtagctgaagtaattttaacttcaatttctcctcttttagcgcgcatcaaagtagagaattgtttctgaatacgagttaagagataaagacgatgattgtctaacaaaacattgtagaaattcttcaaaaggggttcatttccagtcatctgcgtcaaagaactaaccaatattttcttatcctcacgagtcaaccaaggactagaaatgtattgttcaaattccggtctctgttgaagaacaccagacagtttatttaaggccttctcaacattgtccaacttggattcttttactgcagcggtatacagagaagaagcataagaacctaaataagagaaaagagttaattaccaagacaaaaaattcagacttttggatgacaatgaagatatcagtcaaaatggtagcaattaaaaatcaccttttacagtacataccatctaaaccatacaactggacagggggatgagcagaagcagttgcagttgctaaagagcgaattcctaaggaaggtaatcgagcagtgatgggaatggagcgacgaaaaatatgattcattgtaatgtttcacactctcaacgtttaaggaagttggttaatggctccgatcatacctccgttttggtgtcatcctttaagaacaagctacaacgtgcttccttgcaatactttcttattcaggttgttacctacaagttgcctatttgttaaattgaatacaggttgattattaaaatgagattaatttgaaatgttgtataagtggtttttctttttttttcattagataagaatcaaatgccaaattttagaaatacacgcaattgatcattagcagtattgccaaacaatatacactaaaagcctatgtggtaggttgcctagttgcctattaaagacttacatattcttactattctaatgtatatcacctatgtttctggagatgagaggaattgttgtgtgtgcaaaacctacgatggcaaatgattcaattaagggttttcatgtgatattgttcttagcaaagctgcttcttaagattgattaaattaatacataaagtagtaaatctaagagcaactgaaaagatttcatatagtaattaaaaagaaggtagccgtaggcaagattgtgcaaagattagtaacgatttcccttaggaaatgctggaattcaaaaagaagagataaaatgtttaaaaaaccttgagatagagaaagccttatttcttcagaagccgagagccagcaagtgaaaagacatataaatatataccattcagggccataatccaaaaaaaaaaaaaagaaagtaagcaaaaagagttaaaacagttcaacgcaaatgttttcgacaccattgtaaaattgaagcgtttaaataatatggaaaccatatttagaaagatataaaaaaaatgaaaagttccaattggaaacagcttcaatgttgagattcgaaaagattaatttacagcttcactatttttccacgataaactgcttccactatactgtccgtatcattttgagaaatcctaagaacagctctttcaccagcataggcactgcaaagtccagtgtcgattagcagtatacgaccttcacatcgacttacaataccatggaattgaggagtatgtcccataactaaacggtttacatttaaggttttggttacattgagagcgacctcgcaagcttcttcttctgaaagctgagccaaaccacgataccacattggaccttcaatcgcccaaaaatcttccaagtattcaggtattttttctctagacatgaagtggctcaataattcctttcctaattcatttacggtctcctctcggtatgcccactctggtgatagacctgcatgcataaaatgtgatccagtggtattatctttataagtgacattgtattcagagagcaaaaggttaccaatttcaccggaatgcccccagtcaattatcctgttctcttctgaaggctcgggataagatgctttatccccaggatgaacataacgccaatcacctttagcgttcatgaattcatggttacccaaaaggcgaaccactcgtcctccatgcttttctgcctgcttgtgcaagtcattaaaccatctaaaaagtttccgtgtatctgggccgcgatcgacgacatctccggtttgaaccagtgtagcattaccagcagtccattcatgaggaaaaacaggagatacaacgcctgctgcagatagtacatctaaagcatttggaaagtctccatgaatatccccaatagcatatactacggtcggatatttaatttttgcttcaacgtttcctttgaaattgggaaaaactttaatgaattcatgatcaaataattgatttacattaaaataaccgaatacgaatttacaagaaaaagagagtaatatccccaaaagggtaagtttcagaagttttccaagagaactcatgaatgctaaggatgagttactttaccttacttttacatgtaaaaggttaatctaaaaatccaagatctgtcaagattaatatattttcgacatttatagcaagaaatctcttaatatgtttaaatatatatctcattttagtatatatacagaaaagtagtagtttctaactatttagtgccatagggaaaggctgacaaatttttttaacaggcaaattagaagcaatagtttctaattaacatgtttgagcttgaaaaataaagagtcacagacaacgcaaaggacatttgaaagaattctaagcaacatgagcacatgaaaatttaaaaagaagattttgtgaatttccagcaagtattaatgattattaattaagaaattcgcaataacaaagaaaggaataataagagatcaaaaatgcatctctaaataaaatagatagttgttaaaatttgacgtttagagaagcttgtaggaatagtaatgaactagtaaatcctataacaaagaatcaatacctttaatcttgctttaacaaagagctataaatgaattttctcgttaacgtttttaactgatgaacagattcgaaagaataatgaagaataagccgccggtttaagaaagacacaaacaaaattagactaatccacaacgaaattaaaattaaagatgagtactgtttaatttcacttaggtatacatatcctctaggtatagaaaattcgtgaggtaggccctctcctgttattgctaatacccgaaaagtggtgtcgagaattagggatgaatcatcgagtgtgagaggtaaccctttagccgaggaatcccaataaaacatgcgagagggatccatcaagacgaatcgagaaggacccattgggtctatatgaaacgtatgagaaatccaggttttccactgtaaggaattaacccatacaaatgtaaccttcttattcttaggaaggggtaatgaatattcggcggctaaaaaagctacgtcgtcgtaacctttttgttttaacatccgtagatgatcccaccatttttcacgagcagtaagtaattgcttcctttccacttcgcgaagcttcaatgtccacttgaggccaatctcctgaactgtagaaatagccttagatgccttgacttggctcgtgggattgattagagcaatagctaaatatgaatcagagtccaagttttcaacaacagctggggttaattcgggaacgagaggatattttagcaaagatgcccatttgatgagttgaaaagtgtttcgcatcgctgaaacagagcgttcagagtaggagaaagcaacgccatggcgtatggcgactaagtgtggaagacgtgtgacatttaatgtcttaattactttttcgtcatccgtgcgatagagaggagcaaatcctaccaaatatctagcaaaaatgcgtaaggagtcgaaatcttcaggagtagatccataatcgtgcaagtataagaaaaaaacaggctcattagcttttagatttttgaactcttctaaacgaattatgctttgcggataaacctttccgtctgtttcgtctagctcagttattagatcagcgtgctttgataacacttcgtaaggagtatgagccgtaaaaacttttttttgcccggcattgttataataaacaagagaaggaaaagaattgatcccaatttcttcgcatttttctaaagatgaggcacaatccacgctcttgaattttattttgttcctatattttttggacaattgcacaatagaagtagccgagtcggtgtaaaatgattgtcgtggtttttttttagaatcgataaataatacaaacccatgttgacgatgagacaagaaaaattcggaattaatctgtttgaagtcgatcatttcgtatgagccaatactatttagccgcaaattggctgaattggtgttcaacagctttctttctttaaaactagaaactaaaagttcttctcttactccttggttgtcgcgattagctgtcggcattattaatttattgttgacttctttcttctcaactgtagcagaaacagagctcaaaatattttcgaactcttctccttctggtgaatgcaccaagttaactgctttacaaaaggcatggcgcgtaatcgcgaacaggaacgcaatatagagaatagatctccaagcacccagctccataaataatttacgactgtaagtccaatttgaataagtaaattaaaaggattatgaacttctctatcttcttaattctttaattcaccgaggacctttcgaatgcgtgcgtttgatataggtagtgcgaggtgtataataaggtaaaatgtatggttactacaacagctgatatatcgaagcaaatatagctcgagttaacatgggaaaagagctttctttctaattttttgaaataacttgttttaattttctagttaataaatacagtcaggaagcaaatttggcaattatagttggaaaagattctacgacttagataacagtagttcaaatgatgtaaatattgagcagagaatttaaattagacgatactttttctctttgtttagcaatcatattttaacttgaaagtataaagacgtattcaggtagatataattaagactggtcaaaattcattacacataacccaatcattcattttcataaacttatgatgtgtaatttacttttaacaagagaatcatagagatttttgcttaaacttatgagccatagattttaattcggaaatttccacaggacccttgacactgggatcagaaatagcctccaaagcagccaaagcaacttcctcagaaggaaggggttcagccgaagcggttccgaggaaatttaaagcaccagaggttgctcgattgatgctggatgagacagtaaaaagagacgcaagggcgcctgtgaaaggacgatcattaaagttatacataaaaccaggacggagaaatatagaacgaaggtttgaaattttagatatttccctttcagcttcacgtttcgtttttatgtagcggggatccaacccgggagccgctgcatgagcagacacatagcaatacacagggacattagctttggcggcaatcttagctgtttcaatagctaaatctcgattgattgcttcaaatgtaactttatttttagattgctttgcttcttcaggtttaggtgctaaagggttttggccagttttaaacatgttagagctaagactattgattaaatgcgaaactggtcctctgggattctgtaaaatctttttatagttattttccataaggataccaacactgttcaccactgccgaggcatcacgaagaacaggaagtaatgaatttggatctttttgagcatccaacgtctcccattcaacatcatccatccatggttctttgttatgcaatcctccagctcctcttcgggatactgaaaccacctcgtaacccttagcaatggctaatttgcaaatattatgccctaaaaagcctgaaccacctaaaacaacaattttcatacttaaaacgagggagaaagtaaaaataaaattatttaaagaatttaaatcttcaaattagacaatttgatataggccagcccaaattattataaggattagaaccccagaattgttaatgtaagctaacacctcaaagtttcgtgatgcttattattaatcttaataattgagaaacacaaaaatgctgtctcaaaatatttttaaaatttccttttacgaacaatgttcaaaaaaccctttcaacctgagtagttagtaaatcgtagttgaagagaatgaggtaatgtgctagctcaataaggaagaccaagagatggaaagaggtaattaattatcttctattagacttattaatttataaaaatatgtacatcatttaataagtatgcaaaataaccatcattcataattggagtattagtaaaagtttgtcttaaatgagagcgctaaaaaaaattaaaaataaaaatgctttgataatttagtctttaattttctatactttataagccattgattaatttcttaattatctttggattttaaattcgtaataataagatctcaaattcaaatacttcataaacccatttacaaatatgttagattaataacaaattcaattttaagctaacaatagagcttatgaatcataatatttattccgataaccctgaagacacaatttcgagttttatgaagtgtctgagaagccagttgattgctattctgttcatacagaaaatttcgtgattcatagcaagaggaaagaaaaaatctcaaattttttttatttttttttaattaatattattacatatttagttgatcgatcaagaaatcgttgagcgaaagtattaaattcatatattctaaaacaatacactgtggtttaattttataaatttaaaataactgatcgttacgagatctattagaattttaagtcttcttattattgatatctacaccttttttgttttgaaaatatataaatcttattttttttctttcattctaatcaacatcctttttttttttttgaaattgttttaaatcaaatgtgtatttcattatattgtgactgataaaaatatgtttgcgaaagcaacatttgaacagattgagtaaataggctatgatatagtaaatctttaaatttaatttaattctcaataccaaataaatatttcttcaaaaagggttacaaataaattagctatactgtggagtatatgatatatcgatccccctgatgtaacaaatataacatataacaatatgtgtttaagtatgagtatattcagaatacattggaaataacgaaaatccaaatgaaacattaagcataaatttctgatttctaacttgccctttttattttattttattcatcatagttgtctactattccaacacaagttatgatgttaatgagttgctagaatgtttatttgcgagacagtagtataaatatcctttcgtagctgctgtacgttataacgaacaacttaactttcttaaatttttctcaataaatacttaaatttacattgaagaatatagctgaaaataaataaactcacgatggcaatttctcagcctctttaagtagatttgcttttatagtcactatgatctactggtttagttctgtgtgctgcttcgtcaaagttgtaagtcttcgcttaattattagcgaaactttattttatcagatagggataatatccaagaaaattgtactaccaagctgctttgagaagataatacaagtactgagatgagtgtaaaaaagtgccaaggaaaacgagctgcgccctttaacttcatctgtctatattctaaatgccacctttaaaacaaaaatctaacttgtcttataatgtaaaaaccctaaagcttcgcacttatggtgacacatttagtacaaattctttctattccatacgttctttgctgaataaagagcgaagaccgtcccctttatattcgagccgtcattaatttttcattcaaaaactaagatagtaaggcacatcgataacaatctaaagttgtgaaaaaattcttataaaacggaattcttaaatacttatttcttccaaattatttaagcaaaccttcaaaagaagaattatccttcaatgatttaaactcaacaactatcaaatgaagtaattcaagaatataactgtagtcaaatatatacatctatattccccacgtccataagatttgtatatttgtttacaacgggtatttttagttagaagaacggttgcttgtaatgatgaggaaggattcgtgagccggatatagctggaataatgttcaataccttttcctttaatagatctattttacaaaataaatttcgttgattaataaaacaaaagatcatttaaaaatcgtgcgcttcacaaattactttaattttcttttgacacaagattgtgttcctttccaaactaaaaatataattgggttacttcttatattgatagcaaagttagcttcaaaattttaagacaaaaaggtgttttcaatttgattagtttattaaaattcttgatttttttgtttttgctgtatgttttataaaaagtatcatgtcacttgaaatacatgctgtaagactacctacttttgtttagcactaccatactgtaatacaactaatacttaaatcactttatcatgagtcttgctgattttatggaacgtaagtgtcaaattttcaatagagaatgaagtgactaatatagatgttcgttagaaagggttcaagtcattacaaacgatggtcgcgttgtgctaggttccctgaagggattcgatcacacgaccaatcttatactttcagactcatttgaaagaattattagcatggatcaagacatggaaacaattcctttaggcgtttatttattacgtggagaaaatgtgtaagtggacgcagagccttgtactggcggtacgtaaatcaataatctaatagttatttttagagcaatggttggattagtgaatgaggaattagattcagaaatagaatggaccaaaattcgaggtgaagcaatacctgacgttgtgcattaatacaaaaaccggacgttaaacttcaaatgagaacaaacgtttaaggctacataggatttgggttaatgatttttttgttatatttcctctttgtgcgggcgaatcctttgcaaattttgttaagctttccacgatatattcataccttgcagcatgtcttttatcaggaagctattagctcgtagaaagaagtgaaaattctttctttatttttttaaaaaaatatgactgaggttgtagattaattctgatgacaaagagttgacacttgaacgaaaatacttaaaaaaatggtttaaaataccgagttcgaggacatcggttctttcagaatttaaaaaattcttggtttcttgttaaatttgtggatcacaaactcatttttcttcttattttgtgggtttcatctttcttaaatgattcttgggaacgttaacatacctttgtttccttaatttgatttatgcactttgattttgaaatttgtggtcaacttgtttaaagactttatatttatcattgatttttgttattatatggaaaaaaacatcacaatttatatcatttactgtgcataacattcttcatttttgctgtcacgcttaatgtttacactggaaaatttctctaccttgagaaatatttcagcatcatggtccaatttacaaagatcatttgagttaaacaaaaaaaatgatttattatatttgctgctcatattttttttttagtgattttttattttggcatcgttttgtgaacttactttccaagctttgggattatcaagaaaaaatttttgttgaaagaagagcagaaaaactgtttgataattaaatgcctttgcaatttcattttctcaatttagcaaaataaactgaaatttctgcagcagtgactttaggttacattgtaacctacagtttacaacgacctttgtgcttacagcaactttttttcaattaattttttacagccatacaaaacggacttgattcctttatttttagtttattaaagccgttaaatatgaatttggttctccctggacaggtggtcgcgagaggggctcctaacggtgaaggaacggtaaagagaggagattatattatttccacacgaactggcatctttgatccagagaaaaattctgtaacgtacccaagaaaagttgaagagacagccgttttacctaatgtcggatctattgttttagctcgcgtcagcaggatcaatgctcgtcaagcaactgtaaacatctcagtcgttgacgatgtctgcaccaaagatgaatttcaaggggtaatacatgtgcaggatattagagctactgagaaaaataaagtcaaagtgcaaaattcattccgaccgggtgatattgtcagagcacttgtaatttcacttggagacggctcttcgtactttttaacaacagctcgaaatgatcttggtgtgatttttgctcagtctagtgaaacaggagagcaaatgtttccggtggattatcagcatatgcaaacaaaatcaggatatacggaaatgcgtaaatgtgctaaacctatattagacgaataaaatgaggggataaaattgctttgttttgatataacctgatagttttttttccctctcggttcgttctttcctaacaaaaaaaaaattctgaaattgttagagattttatgatacgaatatacggaacacggataaaaataatattgaatatagaaatattggaagttcattagaatgatgattgaggtgacttgctgtcgaaaccgatatcattttcaattagaagtcaaatgtatagttttataagatatagagaacctttgtaattcaactgaacggacaggagctctgaagtttcttaaagttatttacttaatggaactgaattggtcggttgtttataaactctaattcattaacaaaaacatgaataaggagtttctagcaataatatgtgttatgtttacaactttctaagaaggttactgtattaagttattttgtgtaatttaatatcgaggattgcacctttcattggaggctgtgatatcctgaaataacatttatgatcacagatttaaggatgaagtatttaatgacatgaaaattagtattcgtacacctctcagtaacttttcaaaactactttcagtttttacattaagggattggatgtactttttatacacagttttataaaatactaggttgtctctaaacatcaagtatcatctcaatctttactttcggccattagactgatatattttatatcaattaattagtagacaactgtttccagattctcatataagcacgagagcttctattctacccgtcttttccgtatatagctgtcatgactcattaagctactccagcgtgagactatcaaatttaatctcttcatccctaatatttgtttgtaaatacttataattgcaaaatattccattaccatgacatcaaatagaggattctaaatccaattcgcaggtacactgactttaatggattctgggctagttccataaaaagggattgaaaggttttattttccatatgataataggtttcaataatcagttcgacaaaaacatctttcattagcatacttattacctcaaatagtcgatgtttaactatatcagatgactatcttatcagattattcttcaatcttaagcttaggatttctataaaagttggttacaaatacatctctttatgacgaaaatttaccgaaaaaagtacatctggagtcgctcattccatcttagataatttgttcgagaagcttataattccggatcgttttgtcagtaactgtatgatgggctgagattgtcttctaatacgctgtcttcactggaatgcaagagcgcaatggttttatatctactagctttgtgattcggcgagagttaagatgttgttccgaaattagccatatggtgagtaaaccgtgctgcaactaatcttaacagatcaattctcactatttgaatttgggaaggcttctaggcagcaacttccagaccatcgtaagtcggcttgtcgctgtgcagagtataaacgtgatgaaaaagatgtggagataattcgtaactttgaactcatgcacaggtttttattattcgttgttggtatcctttagaaacccttgcgattactccagcttgcacatcaatcgtataaatatagtcttatttctttctccaaagctgctgatctgataaagattactttgatcaaattggtcctgggttaagtaacaatttcatttttgaaggatgaaaactccaaaatttatcacttacgttactcgtggtttcaaaggacttgaatcgaaaagcgttgaaaacaacaaagaccatatcgtagaaaactcgagccctatcgcctcgaaatttcatgaattcgatgagcaaaagaaatcttttgaaatcataaattatgctggtcacgaaaagtttgttgacgacattactgaaagagaatcctcagtaccaggaaatgctgtttacgatattaccgtcagggacattgatgcaattgtacctgtaacggacgatgttgatatacccgcatcgagtaagtcaaagctaatcctactttttccttttttttttttttttagaagctgtcattcaggatttccattactatcccttcaaccttgatattaacttctcactttctttgtagctttcaggatgtggatactggcatttggtcttgctaccgttattgcaggcgttgatgctttctttttgatgcgttatccttcggtctccattgcagctatcgttgctcttcttgtagcatatccattgggtcagctctggtattatattattccacagtgggaaataaaactcccaaggggtatacgtgtttcacttaatccagggagattcaaccgaaaggaacatgcctgcctatatatattcgtcaacatttgtgtctccgcaaaactagttaacactttaattatcgaacaaataaagttttttggagttaacatcggaattggtagagccattttattcaatttatgtagttatctttcgtcattcggatggtcaggtctcgctttgccaattctagtgtatccgccaacattgatttggccttctgttttgagtagctgcgcacttttcaagatatttcacgacaatgataatactaaggcctgcaactggacaatctctcggcttcgttactttttcatagtttttgttgcttctttcatatggtattggtttcctgatctgatctttcctgctttaagctccttgggtgcttggatcagttggtgtaagccttccagtgcagttctatctcaaatatttggggtaaagactggactgggtcttttccctcttacgctcgactgggcccaaatttccagtttaagtaatcctttgatcactccctggtgggctacatgttgtatttttacatcctttgtgttttggatttggattgtacttccagggctttactatcaaaattactggcaagttgcgcatttccccattatgactaacagtatttacactgtttcggggaaaagttatgatgctcaaaaagtggttgattcgaaatgggagttggtaactcaaaagtatcaagaatattctccggttatgcttcctattgctttcatcataaacatagccttgtcattaggcgcattttcttcaatgatgatatcttttttccttcgttttcctaccgatgtcattcagccaatctgtcacgtttttaaatattcagacattcacactaaacttttaaagaaatataagcgtgttcattggggattttatttggcatcaataatagtttccttaggattaggcttcgcttttacagaaggatggcatgatattcagattagatcttatggatttgtggtctccatggttattggagcagctttgtacataccgctttcattaatcgagtctcgttccagcttcactataagtatgcaggcttttttcgaaatagtggcggctttctggtttaatggacaacctatggcattgctctacttctactcatttggatttgggacattacagcacgctatgcatatgactcaaagcgccaaaattggccattatatgaaagtccccccacggttagtcgctgctcttttgtttacaagtggaatttggtcatctctggttaattccgcagtaactggttggatcatgtatcacgttagagacgtgtgtacttcaaatgcggaaaataacatgacttgccgatctccaaaaactcaattcaatagtcatcttatctgggggttagttgggaatcacattttttcatcagatggtcgctattcatttgtaatgtggtttttccttgtaggtgctgtcgtttcagttgttgtttatttgcttcagataagttttcctaaaagctcttggaaacatgtcaatccagctctcctcctaggcggcgctgctcagataccgagtgtcacaggaatcaactattcaacctgggctgcagtcgccttttgtttcaattatttaattcgtcgtggttattattcgtggtggaagaaatataacttgataactgctgctgcaatggattgcggagtcgccattgctggactattcatatatttttgcgttgtatatactggtggttcaagtaactttagctggtggggaacgactgtaagttcggcgggatgtgacaaaaaaggttgtgctcatttatctgtttcggatattagcaaaccttctggatggtgagtttgttggcaaactcatcttttctaattgtttgctttttattagcgatcaagttatattacctttggtgttttgtacttgataaaacgattaaacccttttcaatttacaaagtttccaatcataaacagcgcactttacaagagccctcactcatttataaacgcgaacgctgaaattctactttggccccgtagcgttttattcgaattcaaagtagcagtaattttgagaagtttaacctatcaaaaatattttatttctatacaagtagcacaaaacgactgttttcctttttttttttttttgtcggtgagtgatggttccaatatatgttacatctttatactgtcagaattaacctattgcgggattacttatatgttcatcgattacatttccagtctatttgttttattttatagactttctgaacctttaggaatttttttccattcattgttagtgacacttactatccgtttattcattacttgcactctctatttagcttttattttcgatcaaagttcttaatgaaacgccttacgttatagtatatccatttcaaatgtaaatgacttgatgtctgtatttctttgggcgtagttaattattttcatacgtggcaccaattttttataagttcatatacatcataaattaaatcttttatgaatgaatgtctttgcttaatacatcctggactcatttttatcattcgctaatgatatacttcattaagaaaaagggtttttattgtgccagtactaactaatcaatcatgaaaacatttttaactagctcttaattatttcgtgtcatttattgctcaaaaagccaaatacattggcaattcgatggtgttcctgcctagataacatagttgcgacgcaacttcaccacagccatcgttggcctgaatttgaaaagtaataaccactacagtagaggcctgatattaatcaaatatggcttccaaacaaagagaaaatgtgttcccaacgagaatgtacgctcgaatgctcttaataagtagctaattttattaggaccctgacgactatgaaaacacgtcttaagggcgctcaaaccggtcattctttgttgaagagaaagtctgaagctttgaaaaagcgatttcgtgaaatagtagtaaacattgagcaagtaagtgcctgaatacgcctagttatcttggacatcgaattattcattttgaataaaaataaccgtcatatgtaattcataaaaatttgcagcaattcaaatttttgctaaaaaatgttcccttggcacaataggtatttgtctgtttcctggtcatttacaaatctactgtgtattataggtattttaggattctactccttgttcagactaggcatattcgttcgcatgaatccgttaactaatgatatcttgataggcaaaacaaaagatgggccgtgtgatgcaaattgctgccttttcgatggccgaagttggatttgccatgggcaataatattaatttcgaaatccaacaatcagtcaagcaacctcgtctgcgtgtacgatcaaagcaagaaaatattagtggtgtattccttcctactttcgagatgaatttggatgagagcatagatgattttcaattaactggtcttggaaaaggtggccagcaaattcaaaaagctcgtcaggtttatgaaaaggcagtggaaacactagttcaactggcatcttaccagtccgcttttgtcttacttggtgatgttttgcaaatgacaaatcgtcgtgtaaattcaattgaacacattattattcctagacttgagaatactattaagtacatcgaatctgaattagaagaactagaacgtgaagattttactaggttgaagaaagtacagaagaccaaggagaatgctgaaaaagcagattccgttactaaagaagagcatcaaggtggcagcaatactttacaacagacaaaagacgtcggcggagcgattgcaccagctgctgaggttggaaaggaagtcattaatgaggtcgagaatagcaaggatgacacctattctttaccctctacttctacggacgatgaagaagaaaacgattctgatgaagaagtcatcttttaagcaatatgacgcagaagaagggaattgtttattacatatttcattaagcaattacccgaggcttccaaattaatttaatgatggttgaggctgaaggtttgaaaaatatctcaagtttgcttttatacttgatgttactggaaatttcgtttctttcgttctagttacagtacctcatcctcgtctgctcattatgttccttaacagttcattcataggattgtatccttttacgatatctattctcttcatgtttaagtttttttcttactttttgcctctttctagaatttagttgcaaggttaatgggctttttccgattaagattatgaaaatttgggttgtactttttaataattttgctgctactccagtttacccaacctttttttgctataccaaataggcgacttaaaattagtttttcaaacgattttccacttgtccattcttttgaactacttttttttgcttttgtaactctgcaataatttaaatatatataattttcactttgtacaactacggttgttttttatttattaactgaaatagaactcaaatgttgaatgctcaaaaattcattaaccaaactacaaaaagcttactccaaaagagtgtaaaatatttataaccttcgttctcatggaagggggtcattccattaaattttttagattttgattatatcatcagcatattgtacaaaagaatttaactcagcattatgagtatcctcctataccatgactctaacagtcttggcttaacttagcttattacgaagtaaatcacggtctcctttaacgacacggttcatctcttcagcggtcaaaaactcataatcgactagagcagtagctaatgcatctaactctttcttgtgagatttaagcaaagataatgaacgttcatatgacgcctcaagcaaagacttgatttctgattccactagcgctctcgtagcaggtgagagattatccatttcagcttccaaactaaccgggccaatgcggtcagacattccaaactccgttaccatacggcgtgcaacttgagtagccttgtctatatcattatgtgcaccagacgttattttatcttttccgtacaaaagctcctctgcggcgcgaccgcccatggtgacgtcaagcatagcaagatattcttcacgcgtccagctatctttatccatatctggtaaggaaatcgtcattcccaaactactacctctaggcataatagtagccttgtagggtctcatagcatttttggtaaataaagctactaatgcatgtccaccttcgtgataggcagtcattagcttattttctggagtaatgaatgcactttttctttcagcacccataagtattcgatcttttgaccattctaaatcacgcatactgactgcggttgataagtttttactggcatagacagcagcttggttgattaggttagctagatcagccccagcaaacccagaggttcctcttgcaataatgctgagatcgacatccttgccgagaggtacatgtcgtgtatgctgcagtaagattgccagacgccctctaacatcgggtaaaggaacatgtatatggcgatcgaaacgccctggacgagttagcgcaggatccaaactttcggggaaattcgtagcaccaataaaaacgactggatgagctaaatcttcattttttgaaaacccgtctaaatcaactagcaattggttcaaagtctgtctcatatgagcggcgtctcgtgcatttcttttttgtccaatagcatccaattcatcgataaatataatggaaggagcttgctttctagcggcagcgaacaattctcgaactcgtttggcaccaacacctacatacatttcgtcaaactgactgccactcataaagaaaaaaggaacatttgcctctccagcaacagccctagcaagcattgtttttccagttccgggtggtcctgtaagcaaaacacctctaggcaatttacctcccaaccgtgtaaaatgagtaggatcgcgcaaaaaatcaacgatttcctccagttcctccttggcctcgtcaacaccttgaacatcagagaagcgaacattaatagctcgctcctccataggttcttgctcagtagtgttggtcattatattgttaagacctgaagtttcagcaaaaatactcattcctaaaagaacaaaataggaggccacactaagaccagcaatgaatttaaaaattctgaaaaattttgtaaatctcggttcatcaactaccacatagacaggagttttactacttgtgcccaatgctgatgaaacaatcgtgggtgcccataccggaggtggagtaggagtcgaaggtggcatggaattttgcaaagaatgattaagtgaaggagtcgaggaaacggtagaagatgtatcggatgtgaattttggtacgcctgccgaaaatgcttttggatcactgaaactagaggtggcaggtgaagaagatgattgagataaggatatgttgttcgataaacttctgctccacgatttttttcgcaaagcctcttgataatatcgatcacatgcggagttcctggcaactccttgtgtttcataacggcttataattgcttcggggaagttatcagctagctccttatacaatttagcctgcatatatgggtctgacatattagcatttgccaaatcttcaaaatgcgcaagcttttgttttctaaggggatgaagccccgaagctaatgcatagctccgagttcgtagccatccatgaacaatgctattgttaaacaaccgtcctccgaattttgagcatccggaatacaagaaacttgtctttccctatcgtcaagtaatgagttagtaattatttatgaccagcttccttaagcttatctacatcgcgttttgtaccatacatacgcgatgtctaaaatacttacgaaaagaaatataggatgcaaaacccttgacataaattttgcaatacaaaaaggtgctttcacgccaaattggaaagctaaatcccaaacaatggtttcaacgttgttggtaaacggtaagtgtttagagcataatatttgaatgatgggtaacaaatacacatacagtatgaaccaaagatccactatatagagatgcggcactgtagacagctaataagtaacataagtgacagcgatatcctgaaaatcaaatatattatgttaagagggaaaacctgtttgatataattattgattattatttcaagtcagtatttgaaataaattatctaaaagaatatgttgtatataaaattataatatcctttttaaaactgagcgatggatctgtccattcagaaagttgctgaactgagaaacaatgttagaatctttaacttttttttttcaatgtaattttttttgatttcttgtcctcttgtttccaccttgacttatgagatcactgggttcggttcatgcataatacgttaaaaataacataaatgaagttaatcattaattctccaactataaaagagggccaagttcaagcaattgactttaaaattggtttgttgatctctggatgataacagtgtatttttgcattcgaaatctaaagtaaacatctcattgtaaacgcgacaggccatgggaacaaaaaaaagatttattgagcatccaaggcaatttgatatttgaaaattaatcgttgctgagatttttcatttgcattgtttatagaacgaaagaggaactgagagaacacattaataaaagacattgattaattttgacagtatcactttgagatagtagaattttttaatttctacataaatatataataggcaaagatcaactgttaacattataaacgttattccaatgaattaagacatgggtcttgaaagaatttttctgcaaagattagcaatgctcaatctcaaaaaaaagttagacaacataaaaaaaatgatcgtattggatagaaaatctagttatttaactatacatcaatacatatgggtttcaacttcgcatctaaatgaatcgttttaaccttaaaacaatgtcctttgctcaactggagatggtcgttattcggttattcaaagcttaaatagcgaagctcgtcaaacttacaaaaagaagtaccgcaagcgaacgccttagattttgtattttcattaatttcttgcaagttaattgcttagtatgagaacatgagatgctaggttctttgctattttcgtaaatcggaatgtgctaagattcttttaaattgacatgtcgaagaatagacaattgattactttgatggaagtggttaacaatataatatgccaaggttgaagaattacaacatagagtacattgtttaagcgttcgttaaaaactactaaatagttattgatttgatttaccacagttctaaataaatttttttgttctctgtaatgtaaaaagataattctatttgcttgcttctcagcttgtatttgattgatgcttgagtaaaaaaaatatcggtcgcttcaaccaggttcgataaatttcataaggaccaagaattatgaagccatttacgtcttttacgatgctgttaatttttaaattactttactacgctagaaaccaccatacattgcttataattagatttattgctaagagcttgtattgtaacttgtcaatcaagatcaaattgattctttaccgtaatataaaaaagaaaaagaaaatttctttaaagaatgagatttagactgcatgtttcactatttctcgatgcctgttcacttcttcggcaaaaaggttccaaagattttgctttttttcatcagagtagcctgcagcacggccactcgagctaataccgacaaacacgtttgcatccccaaatttctctggctgccatccaaaaacaaaggtcttgggcaatttttttcctgtaagcattttatacatttcctcccatatgcctttcccggaaatgaacaagcctacttgaggacggtaccgcttaaccttttcataaagaatacgagcaccatcttgcatttcctctttgcgtagatccgctccactagacgaaggtctcgcacaaagattagttatacctaaaccatgagcaggtaaatctttatcgttaaggtacgtgaattcggcatttccctccaaaagtttgcttttattaagcattttccaaaatctattgctaggtgaagcaaatgcgtgtcctttaagagaagaagtaatacctggattgagtccgacaatgatggcatacggattctcgcaaatgtaatctggaaccccctgcaataacgcagggtccacctcattcttctttttaagcgtgcttttcttaacagatgctttgagggtacttttcttagttacattaaccctacgatttcttaagccattttcaagcgtaattgtctcaaccgctgactttaacaacccgttgtctgtatcagaattcttcacgacatctgttttacgatactcattattgcttcctgcatgagcaaagcggaatcgttctagagactccgagaaactttgggttttcgccttcttcaaaatcccaccactggtttcttcacgactctcttcgagctccaaattttcgtcatcaaaactcctttttcttttgtgactttttaccgataaattaaattctgagctgttatcattcttcgttcctgtgtctctcgtctcaatgtcgttcatacaaatttccaaaggtataacctcttttttttcctaaaatattcaattgtccaatatatagttgctcaatagctgctttcaatagtttcctaacttatacagcgttcaaaagacagatgagtaaaagacgattaataaggggatactcacatgttggcaaattttaaacacttgctaacgctgtttattttaaacatcactttaacgaattctaaagctgcagcaaaatccattaatttatcgacagcgaatttccttaatacattaggattcagtattttgtctcgttgataaattatccagcgcaatgggatttacagctacaaaatgcgaaagagagccggtacttgtttaggaattactcaaagagtgtgaaggttaaaattattttttcagaccatcatgatgttatgcttaggtttacttcaaagtcaacaaagatgattggcgtgtaactgtgtttatcgccagatttcaacttcaattaagcccaattatttattaagttgattgtcaaaataaaagaaagtgaataaaataaatttgcttttcattgcttttgccgtaacattatgaatatttatcatttagtgagcaatattaatcaggaaaatagtaaactgtagtgatcctactttttaagcctaccattgtaagtacattatttttcagtaaactccaaaaccagaaataatgaaacaatgaacgtaaaaatagtgcatatggtttgaacgatactccataatcaattgtgtttaatcgttcgactgcttttgcagcaagtggtattcttcataggaatggtgattgcctgttcaaatgatcacactccatactacaataaaacccaacctcccagccatctcaacatgtaattagtcattatcaaaggcatgctggcttctcttttgatttcattcctttaaaatatatagtaaagacaaattaggtcttaaaactatatatacctatttcgatacttttgctgctacacttctaatcggtgaataacatatgcttagataccacgcattgcaattccaaacgcatctttttacaactccttattgtgcataatgttcattatgaagcttaataatcacgtgtagtgagatatttcaccatgatagtaaaatacatcaaattgtgtgctgccggcacagttttgcgtaacaagataatgaaaatggccatttgaatctcaatatatgacgcatttcaacggtatataaacgttcaaagacactgcatggattattgttagcttatttttatctagcaaaaattaaaaaatttgaggaaagcatggccagcgcaactacacattttcagccgaaaaacgtaccttttcgctttctagggcgatcaggtttaaaagtttcggcattttctttaggcggttggttgacttacggcaatgagggttacgatgttgagcatactaaaaattgtttgaagcaagcatgggatttaggcatcaacacttttgataccgctgaaatatatagtaatggaaattccgagaccgtaatgggaaaggcgattaaggagctaggttgggatcgatctgaatacgttattaccaccaaggtcttctttggtgctggtaccaagctgccaaatactactgggctgtcgagaaagcatatcattgagggtctgaatgcttcgctaaaaagacttggattaccatacgttgatgtgataatggctcatcgccccgacccctcagttcctatggaggaagtcgttcgagctttcactcaactgatacaagacgggaaagcattctattgggggacttcagagtggagcgcttttgaaattgagcatgctcatcatattgctacgaaatacaacttaatagcgccagtcgctgaccagcctcaatataactatcttactcgagatcattttgaaaaagacctacttcctttacaacaaatatatggctatggtgctactgtatggagtcccttaaagtccggaattttgactggaaaatacaatgatggaattccggaaggcagtcgtttaagcactacttttaccagtctcgctggtcaattacagaccccagaaggtaagacgcaacttgatcaggttcggcagattagcaaaattgctgaacagattggtgctacaccatctcagctggctcttgcctggacactgaaaaatccctatgtttcaactaccattttgggcgccagtaaacccgagcaaatcgttgaaaatgtcaaagctgtggaatttattgataaactgacgccagagatattaaagaaaattgatgaaattctcaattttactccattggaaattcagtatcgtcgttgattgtacattcccatgatgattatctgtcagctaggtgtcttttattttaagtaaaaaaactttaccaattcattatttggttttgcttagaatataatgttatagaagaaatgaaccgtcatctttatatgtcaaacgttcaaaatctgttcaccgcattttgtcgatctctgtaattagtaaaccaactatagacatttttaaacttaggttttatagtcaatatttttttaaggtttaaaacagacacacgtacactattagtttcaattttacattggcgttttaagaatttgtcagcaaatgcaagttaaatagtatggcatgaactattgcttttttgagataatggaccaacctagctttttttattgatcactcgttctccacgcgattatagttaaagttaatttagttgaagataatatttgcgattgttcacaatcatgactaactctagaacttattttaatctttcctattcatacaacagtcatcaatttatcgatggtaaacaaccttgacaaacaaaggttttatatgatttacataacattatttccttcactgctcgccaaaacccttctgacgatatagatttttgggcgatgatttagttaagtaagttgatttgtttaaaagcacaaaacaataaattttttaaaaataattcatttagcaaagtcgtggtcaaataatttatatatggttcaataactatccatgttatagttaattgactgtattacaactgaaaggtatatttcaggtactataatcgcgtatggaccaaaaatggaatgaccataaactggctaggttatgcaacagggaagaacgaacgatatcagagaaaatgattctgtattgatataatcgatttcgtaaccaagtaatcttctcaaccttgttctgagaataaagtaattatgcaagaatatactgcaaattaactgaagccgcaaccatcaaaaaacacatatactattatcatcagcgtatagcttattaagcttaaaacataacatttgatatcaatagcaatggaatagctcaatgttgttctttggcctttgccaattcttcgaaagtagccttgacagcaggtcgtgcaagaagtctttgattccaagcgtaagctttaggaaactctttttcaaaatcaagctgaggaacctcttccttgaatgaaaatttcccttccccgaaaagaccgccaaggttgtagttccaaggaataaacgataaatcagcaattgtatacttattcgctacaagataatcacgatctttaagaatatcttcaagtactccaagaacacgctttatctcatttctataacgggtgactgcagataccactggctcatgatggaaaaagttgaaccatccagcttgaccccaaataacgccttgtccagaagcttggaagaacaagtattggataagtttatagtattcagggtcatcaaaggataatgaaatctttcgatccgtatcatacttgtcagccaaataaatcaaaatggcgtctgattcccaaatagtataatcattgtttttgtggtcaactaaagtaggtactcttccattggggtttaaagccaagtgttccttgcatttttgttctcctttttggaaatcataaaatatttgttcgtaagaaagattcaattctttcaaagcaaggaccaccttccaaggattgggtcctccagcatgcgagtataaagtaaaatgagccataaaattggaattctggctaaaaatttgtaattggtagtatctaaaactagaacgaggatgcctgacttttgtatgtatcgtattactgagtgcttatgtaagaaatttgtaatagcctaaggccatttgtaataattgttagtcagcacccattttaattagtaattaataacaataaatttctttatattccttatttttcgttaccgttgaagcgtgggtttttacagtgaatcactagtatgctcaaaagtcaaggaatgaatgattaatacacaaatgcaaacagcatgttgaatgaatggttttatgagagatcaatttagctgaacaaaaaaaaatcgtaattacaagcacggggaaactattttatactaccggtacaaacagctgacatcttttcatttttgctgctatttcataatatcgctgatacttgattcttctatctgatttttcgtagatactgtatgtagaaagacattctgaacgaattcaaaactcaaggtgaaccgactgttttgcatcttcaattaccaaatttgagttgttaaacaacgaatggtcgtaaagcttttccaattataaatagtaccaatcttctttctctgtctcatttatataatatacatgtatcttattttacttttcttgcagactacatagatttacacatccttctttacctataaaagaatgtactcgtaatttaatcgacgaataatgaaaacataatggttaattttggtctaagtttaataaattgtagatgtttaatttattaattggacacttcagtattttagtaaaacgtcgtgtcttacacgcagagtactctcctgtttttcttttactaactatttagttaaaaacttaagtctttatataaacttataagattattcgacccgctttctctaacctcaatgtacatcaattcgtcaacaaactatttgagcaaattgaatgtgtacgatttatgaaagaagcattacgtcttgttagctttaagctgcattagcgatagcttaaaacatataaggttattttgtctggctaatatttcttcttgcttcataaaattggaattacacaactcttaaaagtcattgtagtctctcacacttaataatttacttgggattttttgccgtttgtgaagtagtgcaaaacctttctaaaaatttttttacagctgcaacagccaatactggtgctgacaatcatagcacaaaacgctttgcgcgtagaaataaatagagaagtttttaacctttagaaacttccttgattctattgaagttgactttctcttcattcttgtgctacttacttatgcggtgaaagcgttagattatgctgttttcttttataacttggtaaaccattgatattaagtatgagattattcaggaacaagcgcatattgtaaacaaaaaaagactataaaaaaggtagcataccaatgaagctttgctcattttatcaagaaaaattagtatgtgtactgtaaaggaactctcctagtgagttttgttacaagctcataagggctagtatcactacaatatttagcaatgtctgccactgtcaattctggagttccccaaaatattacttcatcccctggcttgacatcaggaatgtctgaaagatcaacagtaagcatgtccatggaaaccctaccaacaattggagccttcacgccattcactaaaactggacatccatctttaacttgacggggaaatccgtctccgtaacccattgctacaacacctagtttcatatctctagtagcaacatatctccctccataaccaatgggctggcccttgtcaacatgtttcacacttattatggtagataccagtttcatggcaggctttatattaacagactctggagtttttgagtctttatttttagaaagaaatggagaaataccatataacatgataccagcacgcaaccagtctgtgcacacagtgtttagccagcccaaaataatcgcagatccgccagcactaagtggacctggtaaatgcgcaacagacttttcaaatatatcccattgcttcaaagtgtgttccggattttctagcatatctgcaaatgcaaaatgagtgatttttccgatattactaacgtttttgttattgcttagtaaattatagaacttcataaactgactaggtgtaaaacctagacggttcattccagagtcaagtttcaaccaaatctctactggtctgttgaaagggtatttaataaaactattcacctggtcttcagaatgaatgataatagaaaaattgtaatcatcaataagttttaattcatcctcctcagtaaagaatccttccaggagaacaattttgttatagattccaccgtgccttaattctaaagcctcttcaattgaagaaacaccaaagccatcaattgaagagcaatgtttgagaaggaaacgtgcaacttgtacagctccgtgtccataagcgtttgcttttacaattgctaaaacatgaccgcttggatttttttgaagcatcatttgcttggcaacattataattgtgtgcaatggcatgcaaatcaatgacggactttgcacctctcatggttaatttaaatgaatcaagatagaaatttgtatagcaagggacgttatcgagttatttcgtgaaccgttgacaattgaatctatgctttaaatatccccattcaagaagcgctatcggaattgaagcctcccagttgatttatttaagcgaatttactacagcatttccatatttttgctatcctcaccgtgcatttccagctgcaatcttcatcacgatacttcatccattgtcgcttaaatttatttctggtttaaccgactatcgagaagaacagataatgtttcatttcgcaaaaaagttaactcagttaaggtggatgtccaagtttcgcattttaatttccggttcgcggctaaactgccacggaattgttggcacttcaaggtggtgctaaaaaaattacatcaaaacaggatgatgttctataacattcgttttgaaatgaaactgtttttggtaataataagaactacgtggtagttcagatcgtcatcaagttcagtgcataggtgttttgttagtcgcttcaattgttaagaaagtgttcaagctcagcgattactatcattatataaaaacacactcaaaaagtatgtaggcttcaatccaaatctgctgaaccaaaaaacaaaagaagaaaatgatatttacccattacgactaaacttaatttcgataaatcaaaaaaatcttcgagatttaaattagcgttagtacgatgataggtgatgtattaaaaataaattaaggaaaataaaacaagaagttttagaaatgcattatcttggaagagcttaaattgtaacatttggctccaaacactacctcagtgtatcccaatatataaaattcagagacttcttttaaatacggatcaaaagaaaatgattttttaattctcttgattggttttatttgaaattaaaagaattcctggaacaggtcatatctgaagcaactggtaaattcaacaagcggtaagtaatctgcaaacaacgcagaaacaaacaatgatctgatagattaagcttcctagttggcaaagtagaaatacaataaactgctcaggaaattaattgcaaggcatatggtagtcacttgtggaaaaaagttgtaaaattttaggtcatgcttttctaattaagtacccagacaaacttgtcagcgcgccattctaggtgttacaaacgcttgcgaacaatttgagaccatttattcaaggtagacgacatcatttttagcagcttctcataaatgctccaagtccactctttcgcagccagcagaaattcatcctcacacttagatcaatcgtgttgatttataaatattaaaaatctcaataagtcattgatgataaaataaagagtttatgtttgaatatcgaaattcgaagagtataataatatttttttttttttttttaattataaagaaacagagacgttttgtaaaacgatgagggaggaaaaatatatttttttcttttcttgttttaaaaataattcaactattcagatatggaatgagaattaaacatttacttgcttagaaaagaaataactaagtaaacgtgatcttttaaggaagaataaatatcgaaagaataatacccacaaaatgcatttatttgtttaccttggtaatataatttgcgtgctcagctcacttcaagtttctatacgtattcgaaatcaaacacaacctctatttagtgataacactgcaaattaatatgatgtttcaaccgatagaaagtattaccacttaatacccttgtatcagtacataagcattgtcacttatactgcactcgaaggtatcgtaaaaaatattaaagatagagcgtaatttatttttatgtatgtcgttgatagcattagaatagtctttacttccagtatcttgggcatttcatggcagatttattataataatgtaagtaatttagaacgaaacgttctcatcgttttctacaacgttcgcttctaccggaatcatgaaggctaatatcgcgtgcgtgcaaatggcacccaaagtttgtgatgtaaaacacaatttacaaaagatgagttcttatgttcatgaagtgatggagtcaaatcctagcacaaacctaatcttattccctgaattgataacttcaggatatgaatgcggcaacacttttacccaaatcgctgaaattgccggtgaaggcccaagttttaaaacaatgagcaatctggccgcaaagtaccatgttaacattatttacggattcccagaaaaagaagagaagcaatcaaatataatttacaattcgtgcatttacatcaccgaaaatggaaatttaggcggtgtgtacagaaaagttcacctttttgacaccgagcgtaaacatttcaaaaagggttccgatttcccaatattcgagactagctttggaaaattaggtgtcatgatttgttgggatactgcgtttcctgaggttgcgcgaattcatgcgctgaacggtgccgatttactggtagtcgcaacaaactgggaaaacccttattccgacgattgggatttggttacaaaagcacgggcttttgaaaactgcattccactggtggctgccaacagagtcggtacagacgaaaaactttcgttttttgggcatagtaaaataataggaccaacggggaaagttataaaagctttggacgaagagaaagaaggtgttatttcgtataccgttgatctggatgatgctaaacctctgaggaaaaactactacacattctttgaagatcgaatgccagatttgtacaagcgtttgctaagtccataggccacggtctcttgattacacttttgtacttcttttactatgaaaaattgaacagctatctacttttacatttaaaatatttataatgtttagaagtgaaataacgaaaaataatgttcaatatattataaatattattaactttgtccttctttttttgcaaggcaatatctttctgttgttttgaagtgtgaatttcaattaaatccagaaaaggtcgattgtcgtactgtataaaagctcatacacaatttaatgaccttaactatcctttcaagcattcgatgagtttagtttgattgtcttcattactttacagtttatagctttttttggagtaaatgaaatcggactcatttactccatcatcgtcactattctaattacacttaagaatatgtcaaattcttcatatttgtagggagtttttaccatctattctattagactttaagcaccagaaacagtcagtcctaagtttgtaaaactgaatgcaattgaccgcaactaacttcagcgttttgtcacttccatcaactttttcactataataaaccaacgcagtaatttttatttgaaactaaacatatgtaacggtgagtgataaattcaggtatcttattgcagtcggagtttgaaggctcaaatcatgataagaggtttgaaggcagaagaacagcaactaaataaatagttcaaaaaagcttaaggattatgggatgttaattttcaatcttcagaattaacaatgccaattcatccttgctatagaaaaacccttacaaagcagcacagtttattacgacattaattggtggaaccgtatcgagtttagcgagactacaagcaaatctatcgttatcggctgataagcctttttggaaaacagattgttagatataatgactttgtacgcgctagtaggtaggcggtttaatttgtaaacaaccataatatgtaaaattcaataaattggctaaattgaatggtaccgttttgaagaagggaataaatagtgaagagttctaccaaaaatgacatcgacatctcattttgtagctagtactgtgaaaaaaccaagatcgcgatacggatgtttaatctgcagaagcatgcgcaaaaagtgcgatgaggtgcatcctcaatgtggacgttgtcttaaagctggtaagcaatgtatttggaagcagcctggcactgaaagaaagaacaagacgaaatggagaaaagcaatgcagaacaactcgatcccaattcaggatttagctgatgatttcgagcttgattttcctgatactttagacctaacgaatcctgatgctctcccggtacttggtgaatcaattgttaatcctatatccttaccggtggacgtagcgtctccatttttaccctctgaatgttacccatcaaaagtcgaattgccctactttcctctcctttctaaaccgaataccttattaagtttattaaacgatgaagaaatctcctgttgcgagtattattgctattcagtagcacccatcaccacgattcttccgggtcaaccaaattttttacctcaattacttcttcctatggctttgcacgaagaatctgttttgtatagtttagtggcttcgggatacaggttgaaatacggaaacgataactctttggcacttcaaaaatccaaagtttttgtgaatcgtgcattgttaactctaccggaacgtcgatctttaaatctctcaaaatcggaatttgtagtatctttagcttgttatattcttttggtttatacggaaattgcatttgccgatactacggaatgggcaacatattttttaaatgcgtataatatgattaacaaaatgggcggctttaaaattcttaaagagtgctcatcggaaggaaaacttttagcagaatgcttcgcatactttgatatattagcatcacaatctaatttgaatgggacatattattcaatatctgattatactgatgtctacggggtcgacgagctacaattatttgaatcattggaaaactgtatcaagccgttagtactaattattggagatatcattaatttattggttgaatcccgccgtgctggattcgatgatttgcaacacacattaaacatctatgaaaaatcacaaacaattgaaggaaaaatttggtcatgcgtaccacagtacgaggatatgaaatctaacaaacttgattctgaaaaatcggaacctttgcaactttttaagctttataaaacaacaacagagatgtacctcagacaagtgatcagtcggatgcccccagtttctttagaaatgcaagtgcttttgcataaacaaactcaacttattgatttgttactcgagtcatctctaagaaactcactttcctttcccatgctgattgcgggactgaatgctgcaactgatttacaacggaccaattttaaaaatagagtaaattgtctttgccaaaattatacaattggtagtctcaaaaaggtttggattgtggttcaggagatttggaagatgaatcaaaatgggaatatttgcattgactggtatgaggtggttcaaaaattcggatggaggttaaatactggtgtataaaataacaggattatacttctttccaaactctgttccagaaacttgtttttttgccgtcttcggtttctttatctgaagactgttcatttgaataggttggttcaataactcgtctgccgtttatgaagtccatgtcttcataagatacccactttgtctttttaataaatttataagatagccaaatgacgaaaaacaggggtagaagtatataggcatcgacaaaatcgccagcagcaaatggtttaaaaaccgtccatccttgtactagtgtgagaatgattcctataacgaatcctataagctggggaaagggataaagaggtgatttaaacggtaaatcagacaaggcatagccttgctttacccagcctcgtctgaaacgaaagtgaacgaatatgattgctgtccacacaatgaatgcagacacaccagctaaattgataatatagccatatgccttgacagcacctgtgctgtaattcataatggaaagaaacccgaaaaggtggactgagtggaccgcaacccatggtacacctcttttatcaacccttttaaaaatttttggagccatgccatccttggctaaattatacaaagatcgacttcctatatatataccactgttgatggaagaaaggcaagtaattaaaatgactgcattgacaaaatcacctgcgtgattccaaccggcattcattatagcaattgtcattggagacttgagagttttggagcctgacgaaagatttgggtcattccatgctacggtgataccgtaagagattgagataccaaaatagacatacaagattctccagaacgtttgtctcacagcaagcgggatagctttttttggatttttgctttcagctgcagtcatagatacagattctacaccactaaaaaagacaccggcatatacaaatgctgaaactatacccccaaatccgtgtgccaatggcatttctttaaacaagttgggcggcttatgatgaggaattcctccagctgcgtaaattattgcaaatatgtagaatccagtaataaatagaagtttaatgaaagccaaaatgtattcagattctccaaacactgacacacctagcatttggtaacacgtaaaaaaaccccaaaaaattagaaaaaagccataagatggcacatgggggccccaatattgaagaatagatgttaaagatgtatattctgctgcgatgttggtaagccatacgataacatagttccatccgatagcggctccaaatgctgggtcaacccatcgagcagcatgagtattgaagttgaaatcaaatagcgaattaaactcgccgatactcagcataaccccaaaaacaacaatactaacgatggcaaagccgacaattagacccaccggaccaccaatatgcagggcactgcccataccaatgaagacacctggaccgatgataccagcaagggccatcatcgatacatgacgagtcttcaatccacgtttgattccatttgaattattttccgctgcgtcaactgttacaacttcggaaactccaatgtcgaggttttctgaggaggatagcttcttggcaggaactttctcagaaggcgctgcctccattttcttaattaacttaattcactttattcttaatattagaaattacaattggtattgtgatctatatatgtacaacagaattgataaatgtaatcaattctaataatgttagctgcagaatcaacatgaattctaccgctaattgctcaaaaaaagttgttttaagcgtcaaatcgtttaatcgtatctttgacgctgtgctaatcaactgcaattcattggaatttaaagtgttattcaaggtaagcagattatcagtgagatttttaaaatcgccaaatttcgctaaattacttagcctacaatgatgataaagataagcttctatataagtattaaaaggtgacagatttcaacgttttggcgatgcgtttatttgaaggtgataaaatcgtctttataagatgagatttagcgacttgtttaggcggcccatatatacatgtcggcaggaagacacggttttgatatacccatatctatatatattcagataaattccatggtgatcgtcgcagtaagaagctgataatagttgaaaatgacggttgatcttagggaagagaaagagctcgcacagcaaagatttaaagaaatttgcaagcatgcgaaaattgttgatacacacaatgacttcccttacctgctgagagttcaattacgaaataagctgcagctggcggagtttgattttgagaacggtttaactagtcacacggatcttgtaaaaatgagacaaggtcaagtcggagttcaattttttagctgcttcattgaatgcaaaaatccgaattacctgtaccaagactttgatacacctactactgtggtgcgcgatacactagaacagattgacgttactcgcagattggtttgcaaatacaataatgatttgaagtttgtcgattgtgcagacgatgccatagcagcgtttcgaaataatgggaaaattgcaattgctttgggagttgaaggtttgcaccaggtggatacttctctggctgtattaagacaatattactcacttggtgtgagatatataactttgactcataattgtgataacccatttgctacggcagctagttccattactgggggccttccagacagaggtctttcagcgtatggaattgagtgtatttttgaaatgaaccgactcggtatgatggtggatttatcgcatgtaagccaccgcactatgcatgacgccctcgatgtaaccaaagctcccgtaatattctcacactcctccgcatacacacttacagagcacgaaagaaacgtccgagacgatgtattggaaaggctgaaaacgaatggtggtgtcgtacaagtcaacttttatcaagatttcattcgtaagcctggaagcgaccgtgcaacaatcgatgatgctgcagatcatatcttacatatcataaaggtagccggttgggagcatgtcggtttaggatccgatttcgatggaattccccaaggccccaagggattggaagacgtctctaaatatcccgatttgatctgtaaaataattgaaaggacgaatgccacaaacgaacaaattgaaggattaatgggtttaaatgtgctccgggtttggaaaaagaccgagttagtggcattgcaactatctaaaaaattggagcccattgaatcaagttggtctggaagaaagtgggagttttacagctatgctaaagagtttccagagctatttccagacgcctataaactgaatgaaaagagtactgtttggaattatgatcagcctttgaacattgagaaataatatcataaggatcgttgactttttaagaaggtgaagtaaccagctttcatttcgaggttacaaaaaataagtcatcagagagtttttagcagcatgtccttctttcatacccaataacatgtttcattctactgatttttaacctatgaattatcccaaggaagatcacaaggaccgattgcaatttcggttaagttcgtatccacattgtgtagtttcgacaagtaaatatgaacttacaaaagtttttctattaatcagtatagttatagtagagatacgttgaataaaattatgtgttttataaatcaatggaataagcaagcaatcagacccacataaagaagcactttgctacatgaaaatcgcgctaaggaatcagcaataagacaattagagaaatatgaaataaagaaaaagaagcatgcgagaatttgatatgttgatgcaatttatcaatctactactttgtaagcaatgaagcaatgatttgttcgaaagtcacagagattcaaagtactgaaccatacatgattttgtcaataagctaacagggcataaggcccacaatctatctttaaacaataaaattaaaaaaataaaatagcaataataagagaaggagcctacagcaccccggattcccatgttgtctccaaccatagtactaacgaggccctcagacgcttaactgcagtgatcggacgggaactggtgttttcgcctaggtatggccgtagacaatgtttttcaacaatagtaaattatatggtaattttatgaaaaattttatgattaactgttaatgaaaagaaaaagtaaaataatgaagacgacattttgtcagtgtagacttttgagcatgaaatttgtgaatgatcaaattcgattaattgataatattttttactacgttttattttaccaaaagtatttgcaacatcatatcgattatgaaaaaaatttttttttaaacaaagtaaattaatatatttgttctattttcatctgttaaaattttatttattttttacaatctattcgcatttttaatttaaattaattttattattttttttatatcattttattttattttactttacttttttacggttttttttccttgcatgtcttaaaaaaacgtttataacggtaaatttgcatacatgctcaaaagagaaaaagtcgcatatgtcaatagtcttatctttataaagagtccaaattgcataaagccggaccatattataaaaaacaaagatagctaattgaatcatttgaacgaacgtatcaaacatgttcaaaaggacaccttaatcacatgacttgtgcaataaaatattaaaacggattttagatgcgggatgactaatttgatgtggagaaaaaaataaacgatagatggtaattaccaaatagtttcttttgagttgcagaaacattggcaggtaagctagctataccatgcaacaaggcctgacttggcttccccttgtataacatgttcatttgtagttgcatatttgcagatcatttttatacatattctactttttcacagacatggctaaggaagtatgtaaggaggaaatgtatgctaatttaattctcaacaaatccatcttgttgcattgtcggcagtagaatttttgtttttagttatgaattactttttgagtaagtacatataagatgatagtttaagaaggaaagtcgatctacacacgtttaaaaattgttgaagcgattcgtgcatcggtcaattgtatactttaaagcttttctttccttaggtcacatctagaacttattgaacacgatttcaagttgtgaagaggaaaacggatgcgatccacttttaccggagctggatgatttttccaatcacattgtttacatgtcaaaaagggagcacaagaagtcgtaaagcaaggatcgcatagaaaatgtaaaggaaattaaaaaaaaagatgaatgaatgaatgaataataaataaatggaacaaaaaaatgaatgaataaattgaataaatagattaaataacgagaacagaaaatagaatcttaaaaaaaaaaaaaaaaaggacaaacaaggaaaccttaagggttgcgtatgtttgtatgtgcttttcagattcaccctttattcgatttctcagtattgttttctttgcctggctggcttaccttttcccgtagatgccagccatcttggtaaatgtacatcccccacatagacccatgtcccccagtcgactgcaaacatgaaccactttgctactagctaaaaggaactgactacaactttgaaaaagttcctatgtgggggtgaggggggaaagaaaaatgcggaggaagtgtttcgggaataccgtgtttctgccgaagtctttgccggtcgtggaccgggtgtccgaggaattccctcatgacaacgaagccgagggtgtcgcaaatgggatagcgagagaaaaagagagagagcagctgaaaggaaatagcgatgagagacgaggaagagagagaagaactgagtaatgcgatagaggaggaaaagagaggtgtgttatagcaccacacaattttgaaatgtaaaataaaatcaaagacatgatgaatcaatcatctttgtgataaatcaattcaaacaatcaatggtgcttttgtgcatagtcaatcgtccattgactattcaactcattgacctattcaacccatgacaaacatagtgtcgaccttagccttttctcatcccattttatttttcatcctacatctttacgtctacaatttacgcatcccttcatcaccaacccaatccttcctacacctatctccatcttacaaatcttactcattcatttgatagctagagccatcatcctgtatatagactcaaaaagaatggaatgggccttgtcttttccatctttctccatgatacgaatttacggactagtgtgcttgtcactttccactcgctaatctctagcacgtggaatgcaaccgcacagggaaacgaggatgtaaagcaccaagcaaaagcaatgcagtggaatacgaaaacggtgtgtgtaacgacataaaaaaaatctcattcttatcagtaatgattagatagtgtcttgttctttgtctttgtttttgcttcttgacttgcccgatatacttgtattaaaaatatactccatagtaccggattttacgcattgctgggatgtaataaatgtgtgatattattattttgttactgcagtgaaattgggttggttcgtaaattgaggtataagcttgttaaacaaaatggaagagagactgataatcgtagtaaatgaaccaataaatggaaatgtatttgacccagaaaatcaaatgatttcagcaaagagagattggaggcaaaaagaagaaaaagaaaaaagaaaatggccaaccgagaagaagaagaaaatttttttagcggaagagagaaaacattttgagaaatttaacgaggaacgagtaaaagagtaaagagaaaataaataacaaaagaatatataatgaaagaattaataatcaaaacatttacaatttaactctaaaattaccatttacctctttttctttttcttcttctactatacttctatccactttactcatctcttctcttgccttttttttttttctctctctctctctttcttttctcttttctcctttctctttttgctgccctactcccgctgccctgccgacgtcctttaccctgtttttcctcttcttcctcttttcctcgttttgctcccggaaaaacgataagcttttctaacgtgtttccttcccctaacctgcaatcttcacatttgcatcggcaaggtagcaggggcggtagttacgttggactggggtggctagattcatctttaaaatagtagggtcaggatgattgtaccatagaattgttttttgtcctctactcttatctaagatttgaaggcatatctattgcaaaagcaaaagtatctgaaacttcgatgactgcgtattttttcatataaaacgatattgaccggcattgttgagttgcgaattgcgtttggaaaaccagcggaaaaaaaagtaggacatagcaaattgattgcttagcttttgtaataagaagggatcagggctgttgttgttttcttggtttagaaaaaaacagaatcaaaaataataaagcaaaaaagaatattttgttctttttcctccactccccattttatttcacccaacggactttgtgtgagagcgattatcggttcgtctgttattcaagacatactttgtattatttgggtctttctgttgcttgtgtgagtgtatctgtgtgcgtgggtttttttgtgtgtgtgtgtgtatcttttgtggtgtgtataattagttatcgttttcaatttgtttaattttactcttcttcttttaatttggcaatccactttttctttgggccattcatttctatactatactaaataccctataccctctactttataattttagtattctttccttggattcaattattgcttttcactttaaaaaaaaaaaacaagagtcgataagcatttcattcccattttcttcatcattgattagttttattttatttataaattctctatactgtcttgatccccttttttatctgctttggatttacctattttgaactcgttccctacaaacttttacatagcaagttaattcttcctgctgtgtttataagacatatagatttttatacatatattatatttctgttccttttcttttttcttcttcttcttcctaattcccctcccatttttgcttctgcgtcgattgttactgcgtacgttgcagcatactcttcattttcttctagctgtcttttcttattctatttttttattttttgatacacgatgtcaattcttaatgtcatccgctcccatcacgacgtggaaccacagaatgttgaagaggagcctccattgaccgggcaaactatcgttaccgaagacaaactagagacttctgccaaagacaagaaacatgagtcacctagtatgtcggaggatgaagagggctcggtggaaaatgttgatgcttgggatctcacaaaggctcttatgtccattgatcccaaccatcccgctcatcctcataaatggcccttgtggaaaaagttgtttgttgctaccgtttacacatttttagaggtatatgtcatttggtcatccaccgcctgtatcaacttctttgatatttatcaaactaattggcattgcagtattcaagtctcctatcttgtacaaagtcttttcattgtcggtaatgcttttggtcccatgcttttaggtcccatgtcggatatttttggtcgtaaatgggtttatgttggctctctaattctttatattattttccaaattccccaagcccttgcttataacttacccatgatggcaatcaacagtgctattgctggtgcctttggtagttctgctctcgctaacgttgcaagtagtatgtgtgatatcttcactcctgaaaccgtcggttttggtatctctctatttgtttggggtgcaaatgcaggtgcctctattgggtcccccattggtgaggctctttatgatcattggcgttggttttactggatgaatatgattgttggtggtttctttgtaattctttgcgtattgtgtcctgagaccttacctgtcatcaacatcatgaactattcttctactactggagaaaaaaccgttcaagtctctactcttgccaaagctaaatcagctgtagttcgtacaaaatttgtcttatccaccgcttttaaacttttgtgtacagagcctatcattatggctttgggtttgtataacggctttgcgtatggtttgattttcctttacttggatggactgtttcccgtatttgtcgacaactacaaaatgggatacatgggtgcaaatctcacttatttgaactttttggttggtgtcaccatcgttgttatgcttcaacccattcaaaattggctttatcgttgggataaaaggcgtcatggaggtgtagcgcgtccagaagcacgtttcttgatttctctgcttaccgtttggtttttcccagcaggcttgttttggttcgcttttacttcagatggccgaatttcttgggtaagtcctttaattgcaggtggtgttttaggtgttggtgatcctcaactttggcttgccatgattaactatattactgattcctacccatcggttgctggctccgccatcgctgctttcactttaccaagttttgctattgctgctgttcttgtacatcttggtattatcatgtttgacaatatgactaccacttgggccatggcaactttggcttttattagtttgtcgcttgtggccacgatttatgttatttacttctttggtcatctcattcggaaacacagtcgacttgccgttactcaacaagcattacaagaagcacatgatgccaaggttttacctgaagtgtagtgtttattccatcatttctcccttttatcattcatgttagcatatgtaaaagttgttatgttcgtattgatatacactcatccaactttccttttactgtgaacacccgattatgtatgtaccccttcttttttggcaatatgcatctacttctttttgtcgataattcgctattcttttctaccttttttgtactagttattgtttactaattgaaatctgtcctactacagctattgcagttgaaattacagtcgtcttaaaaaatatagcttaaaaagttacgtttattaaaaagctgccttatagcactcgtaatttttagtcgcacagtagtttatacttgcaaaatagcaatgtttaatagattatgtagtattatattcctaatcggctaatgatgactggaaatgcgagtttcaatccccatgtattctggacgaccgaaacagcattgatggttttagcgtagaccgactgtgtagatgtattaacttcagacactgagctgacctcttctgctctacattgtctttccagaacggcgatcataatcgatgtcaaccgattcatcgacaattcccgaattccaagtagcaatagatagcatgtcgtttctttgaacatgtagttggaaaaattaacacaatttataaattacatacatatagtcaaaacacaacctgcgtctcttttttaacatacaatatgtccagcactgaactttcagaaaaggatttagcttatctacgagaggccatcaaagtttctcagcaagctcgtgatgaaggtcaacatccatttggatgcattattgttgatgaaaatgacaatgttattatgtctgcgggaaatcgagttccagacggggatgtaactcaacatgctgagacccgtgccgtaggtttgattacgaagacaagaagagaccttgagaagtgtactctgtataccagcacggagccttgtgccatgtgttctggtgctatattttggtctggtattcgccgaatgatttttggcttatcgaacgaaaatttgattaaactgacacagaaaagtggtgagtgcccgcctttatacattaattcacgagatattcttggagctgcctctcatcctattgaggtggtgggtccctacattgaagatgaagctattatccctcataaaggcttttgggatggaggaagatagctgcttcaatctcatatgttaatgtcaaaagcatattccttgaaactttgctaatacgtccacacgttttatcgtttctgctagctagtagggtagactctgttcaatgtttatgaacaaatgtaattattctatttcctccaattgaacttcttagtaattaaaactgtaattacttctatgctcaaattgcaatatatcttcgtgtacaatatttactttcttgccatggtatacaaatatcaatacgggcctcaggcaagttacaagattaattcgttttataaattaaaatttttaatgccgcttttgttcaaccgaatgcctatgatcctattcaaaatcattagtgaccaaagtgggttttttgctcatatcaccaaaaagaaagtgtataatggtatggtaaatataatctgactggactaaatttctcagtttattgctaaatcctcctagaaaatggaaacagtttagtgtttattacacacgcgaaaattatccaaaaaatgaaggtcttcagcataactcttgttgggatcacttaaccctactttcacgaatcaatcatttaccaagaataatcattttttttgtgctatttaatatttatttactaaaaagtagataaattaattaaatcaaatgaccaagtctcaaaacaatttcaaagcataattgcttttgcattcttacttgaactcttaactcaagcgcgcacaattttattacattccacatattaaaaggaagtgtcactcctttttgcaacagagtagcatcaaactacaactctaagagatttattacctactgtgtttctttcgggcgcactcaaagtcggcaaatttttatggggaattaacatattacaccgcgatgaagataacaatatcaaaaatcctacatgaaaatgataagacctaatcttatcaaagtattctgacttgctccgcaataaaggagatccctgttttggggttactcaaagtctcagaaattgacaacgttatcaaagtccaggagatgttgggttcttttagtgatccatttccaaacaaattaattataaccgtcttgacacaattgttgctaaagttttaatttatttttttctgtaatacaaacacttaatcgatactgggtttgaaatgggatccttagaagtaccgtgcattgacctttctgaaaatgatacttccattgtcgtgaaagaattgctcgatgcttgtaaaaattggggattcgtttctttgaagaatcatggaattccgctagatgaaatagatcgtacatttaagcttgcagacaaattttttgatattcctgtagaagaaaagcagaaatatttgttcaagggtggccgattacatagtggatacacagggcattttggtgagaagttagatatggaacaccagtcgagaggtgatttgaaagaatcctatgatttagcaggatttccagatccaaaattagaaaacctttgtccgtttattgcggagcacatggatgaatttctccaattccaaaggcattgttataaactaacattgagattattggatttttttgccattggatttggaattccgccagattttttcagcaagagccatagctctgaagaggacgttcttcgacttttaaaatacagtatacctgaaggagttgaaagacgtgaagatgatgaagatgctggtgcacactcagattacggttccattaccctgcttttccaaagggatgcagcaggtttggaaattcgtccacctaattttgttaaagatatggattggatcaaagtaaatgtccaaccagacgtagttttgtaagtcttttcctgactccttattctaaccatttacatagggtaaacattgctgacatgctccaattttggactagcggaaagttgagaagcactgttcatcgtgttcgaattgaccccggtgttaagactcgtcaaacgatcgcatactttgttactcctgatcctgaaactcctttgagtccactgttcgaagaaaagactggaaaagacattgaaactgttactgccggagaatggatagatggtcgtataaacttcacctatgggtatagtgcaccaccaaaaggatatttaggaagccaaaatgatggtattgtggcataatctgaatttaaattggcccacgaaatctcgatcctctccttaatcatgaatttaatataattttgtttacgtgaacatctcacatgtcaagtcagtcgatctcttagccccatctcttaagttatgtataaaggcctaaggttacttttgatatagcatacgtttggtagcctctactctaaagattcttgcctgaattactctaattaagattttctttcaagttatattcaatatttttatagtgcctcgctgaaggctttatatctagtactagtttaaaatatcaatagttattgcaatcattactcgcagcatcagagagcaagttgacaaaccctccatttgaaatatggtaaccacttataatatggatatgatttatcatcatagtaagaccataaaagctatgtaaacgctaaagtacttcattcgcaatctttttcaaagtaaaactgcatccgaaaaaattctacagatattgggtgtggaatttttacattcacattaaaaacttaaacgggtacaataaaatactttcatgtcaaaataaatttattaagcgtaataaacgaatgcatttttgtatttatcctcaaaaatatgcgaatcctacttaactttaggtcattagaaagcttcttaattttatacatggcgaaatttgggttttcttatcaattgaatgtgtaaatggcggataggtaaacggaaactgcctttgcagtgatttttttttttcgtttcataccacgccctgaaatgggtgacctgcgacactaaaatttgatgatctctttaaaattaatctcaaaaatagtaaaatgttcacattacatagtaacagtgaatgttgttgaaaccatggagataagttctagtttttttaaaaatgatctttgttgtatttcataacattcctagtatcggcaatcatcttttgtaataccaacaattcctcaacacgaccaagtttcttaggatcatcacgcaaagcaaatttaaagtcatctactttgaccttatttctatttccagctatcctagcagcttccaggcactgtattctagttaataaaatttcaaagaacaagtataaggcttgttttgcaacgacacaaccgccctaccatttcattgatatagtcaacaacaatttcttccaatacatttatgctatctggagcaggattcacatcatctccaaatgcgtacattagagatttcactaaagaaaagtaagcaaaagtattgtgaaaggagctgaaaaaagatttctttatttttttttcaatgatttaaaaacaactaagtagaataatgtgatagatatatagctgctaaagaaaaaacacctttagaataaagaaaatcatctcccttcaattggtaatataacaaaagtcaaaaggctttttatagctcggattcgaacgaaatcctgttgaacttacaatccttcgtaaagagatgctgcctccgagtagggggccttcctcttctattttccatagacatcttatatctaatgggaaacaaaaaccagatctacttaagaacaggcgaatctaatttgatcttaaagttttctcagaggcatataagaatgtcgggtggtttgtgtaagtatttagtagaaataaggaagtgcgttatacttcgttattgatattataagcagcgagagtccagcgataaaaaaattattatagattgttaagaaacacaatgttctctccatactctaattgtagaaagcacaatttggtaaatcattaagacaaaattattgaataggactttactcctaaagagtaagaattagattacagaacatgaacattgcagatgcctcaactactgcccaatgtacagagtaaattcaatcaagcgcgtgggttacgctgttttgagtggaaggaaataaaaagtgttagttataaaagatatgcgaattacttgataatagtccttagtgtttgagtagcgaaaatcaatagatggtaaataaaataatactttggaagtatagtaaaagaactgatgctaaaaccagaatcacccaaagttcaaacgtttctattgtaaaatgcttattaaaagcaaaatcaacttgttttacaatgggtgatattacaataaaaccttcaaacgtgctgccatggaaaatttggaaacttcatcttctactaacatttccgacgcatttactttgttgaaatgctatagaaactaccaattttggaaaatccatgcttttcgacgagctttaatttgttacccaacttggccagcagatttggcttcatgggtcggtatggcgactaaaacgagggaaaggaaagctggggcaaaaaccgtttggattcaatgattccttctctgatgagggtgttgaacgtaaagtaatcatcaatttttgcagctaaacctctagaaatatttcaaaaacaaacttttctaaagacctgatgtaagctacgcagtttggtatctgatttaaggatacgtagaactgcggtgagttttccttgtgatctattatattacaatacacaggttgtataagtagcaactgagtataggtattgtattaactgggttataatgttacctatcactaatatagctcataactgaactgaggaacgaggttcagcagtagctctatttatagtattcagataatattgatcttaatagattatcattaagatcaatctccatatcgtatcatacatggtacgatatataattagaacatgtgacatatagtgatactcaacgtagtgtattatagcgtagtgtagtattgctgacattgccctccccaagattttctatgtaaatctgaggataagtcatatgttctcagatatttagattattgtttttaatataatcattgacaattgctttgtccgcttgtagcgctgtagctaatgtagtccatcctgacataatagtactcggatttagattcgaaatgtacttgacatttaagtagagtacttgttctctgtttttatgttctaggatatgaagaattgttccaatatcagactcatcaatggtagcgtaattgagttctgaattatgtcgatacttttctaggtgagaaacatgaaaagtagatgaaaacatgtgcttgattgaatctggaagatccaattcatagttgtttggacccgacttctgtaacacatagaacggtcctgcaaaactaggtgctaatttattggatttatgaagaaaacctgttttcgttcttttgaccataactaggtctccaggttgaaattcttcaatttcttgtattttcatatcgaaatactttttcatctttatgttgtttgtattcaagtgttctttaactgtttgaaatacttggatcgtttcctgagagttttcgtcagttttgtcactaaagctaggtaactctaaaggtgataaagctggtgaatagcgatgtactatctcaaaaggtgtcatttgagttgctgaatgtatcgcattgttgtaagattgttgcactagggatatatgatctacccatgtatttggatgtgtgctacatacacatcttagtaatttctccacagtttggtttgtacgctcagtttgtccatcagtttgtggtctgtatggtaacgaaaatttcataacgaaattatatttatgtgcgaaatctttccacgtttgggaagtaaaaatatgatcattatctgcaatgatttcttttggattgccgaaataagcaataactcgttgatcaaacattcgagctgtttgctctgctgtaatggatttcgtacaaggtactaagattgccatttttgaaaatcggtcaactaccacgaaaagtgcattataaccagatgattctggtaaagctgtaataaaatccattgataaagattcccaaggtctttctgatgggggaattggttgtaaaggtccataaggtttatgattcctagatttgtttatttgacatgtatggcagttctgtacatattcttgtatttgttttcttattcctttccacgtaaatctacgtaatataatgtttgtaagaagttcaatgcctggatgaatcaatttaccttcttcatgatactttttaataattgtcctagtcagctgagtatcattaggtaataagatttggtctttactgttaattagtaagccatctttgagttggatattctcttccactcgtttgtcttcattgtttagtaaattcaacaattttgtatcattcgtatattctgtaaccacttggtttttaaaatcatcggttatcgagatttgattaacaaagttgatactattgtcttctgaatcttttggaattggttctgtttcgtcaacaattctggataaggcatcagctatgtgatttgctgatccaggtctgtagttaatttcaaagttgaagtcttgtaaaaataattgccaacgagctaaacgtttgttttcaggctcggattcgttagtaatgcgaccaattaagtttcgatggtctgttaaaattttgaaaggttcgatagtggattctaaatagtgtctccaatgtttgagagacttaatgattgcaagcattttttgtccgatacgctataatttaattgtgctttagacatctttgctgaatagtatccaacaggatagtatttatcatcatcatgtttttgagacaatacggctcctacagcgacatctgaagcatcagtttccagtagaatctttttactgaaatcaaagtgtcgtagcaccggaggagaaactaaacattgtttaatgttttctatcgcttgggtttgtgttggtgtccatttccagcgtacatcctttttcaaaagattattgagtggatgtgttaattgtgatgtctttggaatgaatttcctaagataattgacagaacctagaaattgtcgtaattctttacgattcttaggttgcttccattgtaagactttgtctatattttcttgacaaggcgtaaatcctttttccgaaatgtgataccctataaattttacttgtgattggtgaaattcacattttgcttgattgataattaagttcgcatttttcaatttctgtagaacgtctttaacatgttttacatgttcagattccgattttgaatgaattaaaatatcatccatataacatactacatgtgattctttggcttcaccaagtattgtattgataaagtattgaaaatgtgctggagctgtagatatgccataaggcattactagatattcaaaaactccacgaggacagcgaaaagcaagtttatgttcatctccttttcttactcgtatcaagtgataggcacttttgaggtcaagtttagtaaaaattgtagaaccttgtattttagcaagtaattgttcaataagtggtaacggatatatattgggtttgacatacttatttaaaggtttgtagtcaaccaccattctcaaggtgccttcctttttcggaacgaacattactggacaggcgttaatggctttagattctcgtataattccactttttaatccttgattaatttcatcattcatagcttgcatttttcccggtggtagcgggtaatttctgataggtaatctgtagttttcttgagttagttcaacttcaaattctaacccttttattggctttggtagcttttccgtattggtttctgcagtaatgtctttgaattctttatagatatctggtaactcaggttccttgacaatatttgaaactttgttcatttgagagagcgtgtgtttactgctagatatttcaatgttattgtcatataatgttgtgaaggagatagcagctggatgcgaaaatttctttacaaccaagaattctgttttgattgatattccatttagacttatgttaagttttattgttttgcgattaatcttatttggataaactccaccatatatcacactttttgaccagggtctggtaggcagtttatgtgctcgaacagtttcttctgttataatatttgcttgagcgcccgtatcgattagacagggtattgagcacttgaagtctggaagttcagcttgtaataccatttcgtaacgtttcctagtatgatttaggaatttgttagatgagtattctattctcgaaacatttgtcttcctcaggtttctgctattagtggtgttatttttctttgaaagggactcttttcctagatttttattttgcagttgaaaacgcttgtgagttttaccatacgaggctgttcttttgtcctctaaaaagtcataaatttcactgatttctgatttccagtaatttctttcctttaatttccttaaggaatatggcagcatccataatataaacaagcgagtatggaaatcatcaacatttgcttttgacatgagtttccttataaattgaactttgtccaattgatttctaaaaccttcaaatgttttagttaaacgatcacctttgttggatccttgtactttccctgtttgtctgagtaattcttgccatgtaagacttccattctcagaaaacatgcgttcagcgaattgttgctctaattcttctaggtgattcaatgtatactgtcttttagtatgctcatttgggaataatgaagggtattcagtaaagtgttgatcaagttttgaaatgtaactttcaacatccttattaggatcgaatttccctatctctggtacatgcttcgataatatttttgcaaaaaggtttattaaatgttcgtctgatgtttgaattccatccaaattctctggtctccatcgttttgctcttgctttcatataacgataatttgcgtaggacattgtatatgtttccctttgggagatttcaaaagggataacagtccttccaaagttctttctcctttgaacccagaaggagagaaatatatatatttatgatatatatttattcaataattcctttttcctaaaaggagttaattgtagatcacaagagttcagttattgtaagctacgcagtttggtatctgatttaaggatacgtagaactgcggtgagttttccttgtgatctattatattacaatacacaggttgtataagtagcaactgagtataggtattgtattaactgggttataatgttacctatcactaatatagctcataactgaactgaggaacgaggttcagcagtagctctatttatagtattcagataatattgatcttaatagattatcattaagatcaatctccatatcgtatcatacatggtacgatatataattagaacatgtgacatatagtgatactcaacgtagtgtattatagcgtagtgtagtattgctgacacctgagaacaaataaagtactacattttacttcgttatagcaaattaatgtaacaaagcacatcataattgtgtattaagaaaaaattacgtatcatgaacagggcaaatcatctttatttctcaggaataggacggtgaattatattttgacttcctccaaaactaggtgagcaaagaagcagacacacgcactcttaacaaataccaagtacacaatattttggtttcttttaatagtttgaggttttcttaaaaatagtgctagcagaagactgcggtgtttgtttgacgatcttgtccttggtttttaccaatttcagttcgtttgagcaatatgaccgcttctgatacagtctacttgttccaatctttggcagatcgatcaaaaaaccctcaagagcgttccctttttcgaaattacatatctgaggctcttgaactccttagggagacgccctcttcacctacggtggttcacgagcaatgttttcgttttttggcaaattcctgcagcgacaacaatgagaatcgagcggcgttttttaacctgggcgggatcgatgtgctaaaaccgtactgcagtaaggataatgaatactcagcgctcgcatttgctgttattcacaactgtatattggattcacgagagtatcgagcccaggtcgcagatgcgcagatcctcaatctcgccattacttattggattgattggcaacacaaattgaaagcaccatttttcaacatgctttcctttgtttgtgaaatgctgtatcctttctgtaaggactgtagcttggtttttatgggcttgcaactacttccctcgatggttcgtgagggtattgaccccttcacaatttttgcaaaggcctttgataattcccttgtttgtgtttcgtttgctcaaaacccttccatgctaattgattcaattgatcttgttcgtaacatgcctgattttaccaaaaaaacggatatgctgaaccttttcccacgtattgcggaacatgatgccgttctttccacctctctccatgcggacccacagtttttggatttcttggaatcatgtttccgttccgacgactctaatagcataactatggcatctctttttattggcaatttggtgcgaagggatgatattgctaagcaacttatgcaaaaggatttcttgaatatgctcatttcttgcataatgcaggagaaggatgtagatggaaatgtagaaagggtttacgcttgttgtgccgcattacgacacttcatgatacctgtttcttctcgcgctcactttgcgccaactgctattcttcttcaagaaaaactggcaagcagcaggtttactcaattacattatatttctgcatctatgattcgtctttcaatgccatatatcctctgtgagttggcggatcatcctgagcgtttttataaactgaaggattggtcaaaaagccccgacttcaacttggctttggaaagcaatcgtactcttttaggttttgtgaagcattacttgaccgttcctaagtctaaagaaaaaatatcagcttttttcaagaataacattaatctttttgaagaaagtgtggttaccgttctctcaacagaatccaaataccctattgttatcggagaagcagttttcgtggctattttgatgataaagcatggatatgctaatgtagctcaaactatcatcgcgtctcccgtctacgaggctctgaaaagttatagagatgacccaaatttagcttaccagctaaaacaaaacgtccgttctttgttagtgttagttgagcatcgttaacattatgcgcttgtgcaatttatctccgatttccatggtgaatggcttacttgttgttgattactgatacagcgttattgctaattatttattttttcgattattcctaaaggagacaaaaatgtcttgaaattaggaaggttgttacatatgagaacaacttaatctgttccattattcctgagatttgttttctcaattacaagtttcatccttatttattaccattaattatttatttatctatctacaactccatttttgtttacaatgcccttaatgcctttaaattttttgatatacgttgcttatatacaaaaacaaaatgcgatagtcaaacagttcgtttaaagcgctgttaataagattttttaaaatgtctccctttaatatcgcaaagtaaagtaattttataagaaatgtttggatgattattaaagaataagtacataatcgtgtatacgaattaactgttataaacacaaaaagccgctattaaaaagtcacattttttgcaggttctcaagaagtttgctaatcatagcatttcctacccttgtagcttcttcaaaccttggacggaaatattcttgagtttcaaggaaccgttttttgtaagttgtaaaatctttagcagctacacattcactccatgatctgacagcaactacgaattctaaatcatcgggagagaaatcgttatgcttggtagcagtatatatgcaagaatcaagtaagccaggatgtctgaacacgtattcggaaacaccaacccataatcgaaacaaaggagtggagcaaatcatgtggttttgaggatgtatcccaagttttgaccacgaatcaacgatagccaatatacttaaatgactgttccttttagattcatcctttggaatgtttgatatgctatattggtctaataattcatcacttaacaaaagaccacttgagttgcgatccatattttcaccaaacacaaactttccagcgttgcgaatgcgatcctcatactctttggcctttccgctaattgctaatttgaataattcagttacagaagaggcgtattgttgaatttgcctttgtgcttctggatttaaaattgcaagaccggcataaacatgccatttactagaataaatacgcatggaaaggttcattttaatattttcaataccaccacaccagcgatttatttcccaggggtattgattgttagcgtgccatgccaatcccattgtaagaaatgcagcatgtgtaacagcttgagtatcagcagtgatacgatcgtgttctttggcagacaagtacacgactgatgacttgaagcaggagagtatttcgttaacaatttcaaaatgctcatcactagctcgatgtcgtattatgacaagaggttgagacttagggttcactttaggaccatgcatggaatgacaagatatgatgtccacatcctcaggcaagtatttttcaaatgcattcatctctggagccttacatgatgtttgacctccgacaatcgctccaactttagttgcaggcccatatagagcaacaactttatcaatatgttcagcttcaacactgtacagaatgtagtcactcgttcgtgaaacttgaaatccatcctttaaaacggtatatcccccatttccataagtcgcttgtattgattcgtaattttccggtcgatcacaaacatttactctatttatgatgttagaaggtgctaatagaaaaagtccctaaaggcactttgaaaaggagagctaattgtagattgtagaacaaaaattatttacttacctccatcctgccttactgatgtactctgcatacaagcgacccatatcgccaaatcctatgatgccgacctgaaaagtctctttcattttcccaaaatcgaatcccattctgtataatttctttggattttcaaataaatattattttaactttagtaaaaatagagaaacttttttaactaacatatagtgacttttgcttatatatcaaaggatggtggtaactaagggtaatgtgaataagcagaatcgttatgatactgattgatacacaagtggaaaactatctaaatacaatttttggttattttttgatattctacttataacttcatacttcttgatagcatttgaataaagtattgattgtactcgaattaatatatatgagcagctaattgtggaatctgcataatctgagctcatttttctaaattttacttcgttaattaacattcaatctaaagcatttgatcaaaaaatctattagctaagagagtgaaatttcaaagcaggcaaatacaaacaaactggtttcccaagagtaaactgaaatactccaataaaagtaatttgaaatctaaagcacttattaaagaccaaaaatagctgaatttttgaacaaaaaaatcgaagactaatcctcattaaaacatagatcttaaataatctccaacacgcaggcgctttaaaaaatgctttaagtagtttgaaacaattgtcagcacaaaaattctttttagtagctgagagaaatgtaataccgatactttgtcgaattataaaggaactgttgtctacttaatgatacaaaaaatccttagcgtaaaataagtaataagttcggctcaaaggtattagaacataatggaatttttatttagataaacgacaataaattgtgcctaaccacaaactgcaagtttttagtcacattgacaagaaccgttttttaattagcatatcaaagattgatgcagtaagtactagtattgaaaatttcattttagcttgtttttcggcgataaaacaacagatatgcagctgaggtgacagtttcttcaggacatacaggagtgacccgtgaatcatcaaaacaataaaattgtccattgtcgggatttttagcaaatgctgtgtaatgaccgcctccaagaccgccatagtgattatcgacagcataaagctcataaattaatttaggattttctttttcggacaatttatagctacccgtccgcatagacatatctaaattgtcaatagggaattcaactaagtcgtcaattttatccctaaaccttctttcactgctaaatctcttcaaatggaaaatcaaaatttcggggcatctccaaatttccatttgtttactagcctgtcgaaattctttgcatgtaggacagtaccaaggatcttcttcacccagttgctccgttttttcgaactcatctaaacaatcattcaaagtaatggtacgagaatcttcagaatcatcctttttgtccgacaatattgtttttgattctagccacaatgaacgtcccatttgaggagaagaaggtgccacactaaatacaaattgataggatttttcaggccactcacacaccagcaagtcaccctgaataagcaaacgatcattttcctttgcggtcaacttggtgttttcgttactcttcgaaggctcaggatatgaaccgggtgcaacgtctttgaactcactgtcatcttcttcctcaattgaatgagcatctaaaggatcgaccgtcgattctaaatcctttttatcccgttcggttaacaaaggcaagttagaaacactcatgttccaaccggtagggattttttcaaaccgatcatggaaaactctcatttcaaacaatggtgtctgactatgatccatatcaacatccaacggacctttttgcacttgttcatcttcgtggccaagttccaaagactccaacgagtcaatattttttaagttttttaaagttgtaaattgctgatatttaagtttgagcttttcacttataaaggaagcatcagtaacttcattgtctgacaattgcaggacaaatgggtgaccaaaatcgcgtgaactcatataggagtttgccgaatttgtagaatcatcagatatatgatagacaggaaccaaaatgtcatcagatccatcttcgtacggtctctctaactcataaagataaatttcatcttcctcagaaatctccattaacaaagatttggaaagttgtgtaaggaacctatagaaccttcccttataagtttcagtaaccaatattttcctgtaatcgctacatccagatttttctgcgacatatttgacaaggtcttcaatcgtcgccgccttactctcgagtactacctcaatagctaatggagtaagatttgtatcagctggaataaaggtaacagtatgcgaccatacttgcttgacaggtaatggaagggtaagatccatgaaaggatcaaaggtaatcgagacggtgttacaaacagggcacacaagggtactacgatacatgccttgaaataaatctacaataagagagtcattccttagtttatgtaatctccagcactcctcagcagtattttttattttctcttcgtccacttcatacaagtcgggtttagaggtatacggcttttgatagattctgttcaaatcttcatgtagtccatctagaagaaaagctaaaaactcttgagaatcctgttggccatatcccaaaaaagaatgattgaatttaccaatagttgctttaaattgccttggagcgaaagaggaatgttctggagaatataaagattttataagagatgcaaatatactggcaacttggccacccataccaaggggatttgactcatttacttgatttttccactcatctgatgtaaaaaagtcacgcagttcacgagtgtgggttaaacattggagtgcggaattcatataacaagtatttccaaggttgctaagaccacaggttcctggaacccttttttcttgtttttgttcttcattagatgattgattatttctctgctgaattaagaattgtaggcgaagcgcacggtctactggccatgtttcatttatcatgcattcagccactaatgaacagctactgtccattcccagttctaccaaagtcttggatttttctaaaaaatcgataatttctttcgaattgatttttataaaagatgagggatcgatagttctatgcaaaggctgatccgtgtcaactctccataacctaaactgatcactggggagagaaagggtatatttaaccccttccaatagatcctctaaagtactttttgaggaaagagatatttttttaggcttatgagactcattcgcgtccacagcattggtgctcaacagtgttaatgaaaagattggtgggtaaacttcaactaccaaatgaggatgcgactctgagcccaggtttacagtttcccttggaaattcgggtccttttagtccataccagcgaaccaataaatcccatacatctcgagaaatgatggtaaaatcaatctcttcttgcaaatccggcttcaacgttccagtttctaaatcagcaatatcttcttgatctaccggtccaggaaagggaccatcctctgccaaatacgagcagagtcgttcataccaactatacgaaagaatgtaattgtcaacctgtcccaactcaagttcgggttgattgtttaccaactcgcctattaactgcttttgttctgcaatagaaggaaggttctttgatatttctgaagcatcacccaaagatattgatttttgtgaaatatcatccatgttggaagagctttgcgattcctcgctcaaggaccgcggtctttttccgtgatatgaagaagtagaactttccgacagagaatccatataaaatgaagtctcttttgtcgatgtcaacaagtccagctcaatatggaaaattgcgttgttcaaatgggaggataagagaatttttaaaaacggtaaattaattctgttatctcaagtattgacagaatatgaaaaaaaattgtaaatttcttatacattaacaaatatttatttaaaaataagcctaatgagaacgtacatacgaatactataaactctacaaaatctaggcaggaaaaattaatattaaacagaacttactaattttgattattcttgcaagttaagtcaattcaaaagcaggttcagtcggtaaaattacagaaaggtgaaacagtgagaaattttattgaagctctaccacttaaacaccgcaattttataaaccctttaattgtataacccataattcctaaactaaaaatttaacagaccaatattttattataatttcccaaaagaaagaacagaatgcacatttcataatcatttgataaccacatcttaccgtaaaaactttaagatttacgcttcatagagcgtaaagggtcgtgccgatgcttaggattctttctagatttaaatacctttcgcctattgttctttttaaatggtacaaagccaatgtccttgttaacggcttgcattccttttggtaataaatattcaggaacatgacggagatgtctctgggtgtgaccaaggcgaacactggaaacagtatcgtgagttaatgatagtaactcatctggattttcagcaaagtaagatttcaacttctctgaaataagtaattcctgtttcaattcagcagctcttgcggctgaaacagcaacggtagtaacagcacgaagagcatcttccatacgatagcggaaagcatcaatttgattcttatcaaatgagtaaggttgtaggctaatttgctttttttctaagcgacgtaaaacggactcatcttttttacaggattccagactcgtaggcttatgtttgccaacctctgatttgggcactacaaaagacatagcggttccaggttttccagctcttgctgttctgccgattcgatggatataagattttgtgttactaggcatatcaaaatttagaacacaagccacattttcaaaatcaagaccacgagcaacaccatactccttatcttgtttaactcttttctttttcttggatttgtcctttgcagcagctaaaatggattcatcattgacatctgcattctcctgatccttcattttatctaaagttggctgatcagtagaaattacttcttcttcgacaaaatcaacattattttccaattcttctatttcacccatcattccactttcatcagtagcaataatgatttgatacaagcctttattatattgttctaagatgtgtaaacgggagtttacaggaagctcagagttgagcactaagctcttcagaccaaactgctccaaaaaaagttttagtcggtagcatcggtttatttcgttcacaaaaatcaagatttttcctttaattaatctgagtttgagaaggatgtacgctagcaaaaacttgtcttgctcagagcatttaacaacgtactgagttaactttccacttgcttctttatcctttactgctaagataaacggattccgacaaactaacttttgtaaggatgcaatgttcttggaaagtgtggcagacattaagaaggattgagtaccacggggaagggacctactaagggttttcatgtcttcgttatatccaaaagagagcattaaatcggcttcatcgattacaaggaattttaacttatccaatggaagtacaccagatgcgacatgaacaacacaacgactaggtgttgcaattacaatatcaggaagatcgagaagaagaggacgttgtacggtatcagagctattcgtcgcaacattgataaatctaatatgcttgctgcaaaaagcagtaagtttttccaatacattgtatacttgttgagccaattctcttgtaggaactaaaagcaaagcaaaaattccacgttgattttcatcgatttgtttttgcttcaacagtaattccaaaatgggaatcaaataagcagccgtcttaccagaaccagttcttgcttgagctaccaagtcttttccttctaatgctaaagggattgtttcgctttggactgaagtaggtttttcaaattcacatttatgaatggctctttgcaatctaggatctaaattaaagtccgaaaaagttttttcagaactctcttcacgtattccaccagatttttccatattatcagcttcaaatgattaaattaaatatttttgtgtgattgcgctaatcaaagacagaaataaaacacacaaaatatattatttgcaaatatccgcaattatgttattaatcctttgttagtttggcataagcttaaatttgacacaaattttatgaagatggaaattttttcacctgaaattagtgtagaatcaagttatacgcggtattggtttttgtttggtgtatcaagagaatgaagaaatattttcacttggatcacaaaacgagcacacaaattttatgttaaaatttgaatcaattccgagctatttaatcattatgcaaagttaattttttataaaaaatttaaaagagcagcttttctctataaactggctttcttttttactaatttttcgaaagtttatttaacgatctcgacatgcgaatcactatgatgacaaactacagttaaatgggaaaacatgttaacgtagtacgtaggaaatacagttaaataccaagaaaaaataggaattccttgtgcaaaatgcttttaaagcaaatttattataattcactttctatcggtctatattaagttcaactgtatattgcggaaagcaacctatgtgaaactaactattgtttagtttttctaaatctctagattcattaaaaaaacaaccttaactaatactgcctaaagcgtgaaatttggttccttaaggcaagaataggctacgacgccctataattaaagtaaagcctgatcattatatgtataaagcggtatgttaagtttggatggaaaattatagaaatgtattttaaaccgctttttgaagacgttcttagttttatttgttagacacgaacacataagaagaaagttatccaatttttatattacagccttcggcggctgccgaaatattgaaagtagcaatccttaaacaattttcactaaaaattaaaacataattattcacaaaggtgcatgataaatgctaagtttaagtatccacaaattatttagcttacatttgatcaaatactaatacaaggctcgcttaattaaaagcttaaaatttaccgaactcgagcgatcttaacatggacgctagattctagaatatatatatatagctatgtttgaaaaatggcctttccttcttagtactcatttagggtgaaatattcaaatgatcccaatacatgcatataaatattgcagagctaaatttgaagcaggagactattagccaccttgaaacaattgttaacttacaaacatcattcatgatcgtagttagaaagtaactacaaacaaatataacatttccatttttattacataaatataaaacagtaatttgtttagtaaacaagtatttgtctagctttttatttttttaatattattatttttattattaatgctgcacgagtgctcgtgtatttataaagtattagccatggttgaaaagttgtacttacatttgaaaatcagtgttcatgacagctcaacattaatttgcgatgcgccagttttgccagtttaatccaataaagttggcgaacataaaacaatttactaattttctttcattcttctgacggtttattgcccccgtgtcaaagaaattgaatttcataccttaagctttaaatttgttatcaaatcgtagatggtaaaattttttaattatccagctaatttgatatgattgaagaaaaagaaaacaaatatatatttttttgtgtttgcattttattttctaaaaccacgctgcactcccctattctcttaataaagcaaaagcatccatgtattttattactttacaccaagtgttttttttttataaaaaaaaaattaaacatcactttggtgccgtggtcttccaatttcgtctgagttgtcttaattagccttaatttttgtatattataattttgcgattcttaaaaacttgggtgggttattacacattgctttatgaaagttacatatgttcatattatttttgcgctattacctctgaaaaatcctacttataatttataaattagacgtgtaaaaaatggatttgagtgttatcaaggcagcgtctttggacttggaatcattaccatcacagcccactgtttcgtcgtttcagcaattaagagaaactttcatacagtcgaagtcggaagactggtatcttaaaaacggtctttttttcaggtattactcttttctgaaaagctctttagaaaatgccacattggatggcccctctcaggttgcttgtttagataccattagtgtatggttacgacgcatatttaatgcatgtaaacaagatccggaaatttctaagtatgtctgggatactatggagctgaaattctggactaatttgttctcccttcctgcaaataaaatatctattcctggccttaccggtgtacaggttgcggtgaaggacgttttttctaaatcgttacagctttatttgcttgtttgtccttcagaagatataaaaaatgattttttactggactcgttaaaacatgccttgcattgggatcgtcatgccaaagttgtttgtacagcaatacaattgttggtaaaggtaactggtgctgaagcagtgtttgccttccaaccagatttttttgagcaatctttgaagctattaaaagattatagctatgcacaggcgatatcatcgactattttaacagtgttaactcttcgctttaagtcactttccgaagaaacagaggaccgagaggaagtggagacaaaatggatgaatatatggtgtccaataattttatacgagttttatgggaatgaccgtcaagtacaagcgggaatgtcttcgttccttataccgtctttacttggagtttctcctggaatcacagtaaaatttttaagcaggttacaaaattatccaaatgtttctaaggatgcaagagatgctgcatgcctatacgcattgaaaatcgccaaagacagtaaaataattaaaaacttggatctcgttaaagagcatgcgtttgtcaaaacccttttcaaacatcctgatatcaaaattcagcttgcctgttttcgtttgatcgctctgtgccctaatgtgtctagtcctcttagttttgaagatttcgattgtcttgaatctaacattgaattttcattcaatgttttagatcctgattctaggcaaattttgctcaaatctatgcaagactttttcataagactccgtgcatcctgccattcgattgctaggactatgaggtcaagacacagcgataaggtggctttgagtggtctactagaccgtgcaatgcagtttctaacttcctttatttctgtttgtaaaaagcatttatatccaacttgtaactatcaacaagtcctggtatctttaagttttcttgatactttaataagttttggtttggacgataacgtggaatcttcttcaataagggaagctcaacacgattttccatttagtatggttataatcgacagggatcttagccgacttatgattgaccgtttaaaagacccgtatgacgatatccgcaatctctgccttaagattttgctttcgtataaatctttaccagggttcattagtgattccgatgcctattttctttttaaccatggccttgaattactaaatgcagttcgttctcatgaatgtgatggtggggctaagacaatttatctttgtaaccattttatggaaaaatctgtacccggaagtgttttggctaacactaaggtaatattaaaccgtttgaaaagtaatattgagcatgcaaaaacttctttattggaggcagctgtaaattgtccgcttcaaggttatttaattcagcttacctacatcttccaatctttgtcaccgactattgtgaaaaatgacaatgagagttggaaaaacatagtaatggaactaattaaggcttcggaaacaatttggggtctcattaaggatgtattatgtgacgactctccagaaggtaatctcccggatggtgaaggagaaggtggtattgtttctaacttggaagatacgcctgcgcaacttatcctcagttactcatggagaagtctcaaggagacttcaagcttgttaacggttttattgacaaagtgtctttctctcttcgatgaggagtttactccttttacattaaactattacggtgaactaatgatgacatggttatgggaaattagacatcgtggtgcattcactagtgtttatccttgttttattgaatattgctcctttttgttcgaatgcaacaagcacgaaattagtgagctaccagatccatggttgcataaaaatttaagtgtgattcaagaaaagtcgtcttttattacgagaaggagtggtggtattcctttatctattacggccattctcgtagccggaaaggataaaagagaacagctgatagaacaaacggttatttctttgatttctattgccaagcagccagttgaacaaaagaacatagccggacagtttgatttgcctcaagtccatgcaatgaatactcttaagacaatttttactgagcatcggttgtcatcagtttcagttgaatatttagagcctgctattgctttatccattgaaggcttttcccatgagttatggccaatcagaaattgtagcgttatgctttttactgctttaattaatcgagcgtttggaagtaaaaaacctaaagatgcagttaacctcggcaacaacaaaggtctttcaactaagatgtttttcagtaagttcccaacattacatgattacctactgcgtgagttggaggtaagcgttgcatctttatcttccaatgaccaacctagcactggactgtatccaattttgaacatgttttcaagattgcaatacgcacaaccttatggtaatgaaaatgaatggactggtttaagtcagtttgagccacttattttcaaatgcactgctagtagaatttgtaaggtgagagaaatagcgtctttgtcattgacatgtctactggattgtagtaaaatgactacttttattgtgagtcagcttaagggcgtcgccggattacaacaaaatgagatacacggaaaattgttgaccataagggcagtgctttcttgcttcttttcaaaactcacgctgcagcaagttcaagaattttatgaagtagttccgttggcttttatcaattgcttcttagagtttacctccagcaagacgagtttttatgccaaaaaattattcctggaagtccttaacagctatttcatgagtaatactgattcaaatgctaaacgattacaacaacttagacgtatgactatggattactgcaaaaggatgttattagataggaaggctaacgtaacaaacgtctttaatacaatcgggcttcctatacatcaacaaatggcggccactatatttttggagaatctcaaagaattctcagtgtattgtgatgcgcattcaattggtttccttgtatcaaaattgttgcactatgagttctatgaagtccaattgaccacgttgagaagcattgttgattcgccgagaaagaagataattgttaataatcctgagattttgcaagctttaatcaaattaacaccacgaaaccagtggagtcaagttagagcccttgcattatcgttactttcggattccttgaactctacaagctataggcttttaggaatttcatgttcagatatggtttccaacatcctttcaaatgaatgcctacccataaaagaaagttttatagtattattgggttcatgcatcaaacaactaaaaaccgaaaacttccttgagtacaaggtaacctttgctaaatgggtagaaatactactaagttattccaatgaatatcagccatttagctctcgaaaggccgctttggattccataatacattttgatttgttcaacgcagaatcaacagctgaagcgttttctttcgaattttatattctctacttattactgggagacttccttaacgacgatgatgaagaaatccgatctctggctgcaaatcatgcttatcaggttttggggacatctgcacaatgtgtaacagaaatttggaatttatggaagctacgtaccaaggcaacatttggaggacaacacgattttcaacactgcatcaataaaagattgatacttgaagacggttgtgaattagcgtcagtccaattggataatgctttatcgcgaaactgttctttgtttgaaagagaaaggcaaaatctttattattcagacaaccaaaagctcgaagatttacttttctatgcaagctacccaaacgaaaaattaaaggactgggccactgatggtataaatgcaattcttagcaggttcgaagatgtatcccgagatgggccattgggtaagacctcggaccccaatgtatggtttacaatttacaaaataattcgtatagccgaacatgttcatttaccgctggatagagtacacagtttaatgaatcgtatagacggacatcctagcttttgtcaataattcaattctgatatttaatttgattttgttaataataaatatattccttaaagtgaattaataaattattttcttactcttacaatttttgcaacgatggctaaggtaaatattagtataaatcaacttttttacacggatgaataattacaacaacttggcaaacgttattatcaagaaatgtggtaacgaaaaaatatcgtatgcatatatacatatataaatataaacaaaagttcgaaagaaaacaaaggacagcattagggaagtcttttgttcaatactttctcacttggaagtacccaacttttttgcctaatttccaatgatattaaatctgtatcgccagcggcgtctacaatatcagctattttgggaggttcggcccatcctgttccaccaaagaaaatgtcgtctacaatctctctggtgtcatacttgttatttcgggtatgcatatggaacacagtggttttttgattgaagtcctttatcgaatgaagcattttctctgcccaagctgaagcaagcccagtcgatgtgtatacttcatcatcgcgccgttttagctctttaccatctgtcagaagacccgtaaggccgctaaatacttggggtttcccaagtgtcttgcttactctaaagtccttattaccggatgtttgcttaaggcttattccaatacgtatagtggcattgattttactgtcagcaagcaaatattttctagtgtcttgaccgacataaacatattcggtcaagttgatctttagaatacctagacgtatgacaccagaatctgtatgagaatcacaaagcacttgtaaaattaaaaatttatcttttaaaaggttatcgttgtcgattatcatacgaacggacacacaagtctcgtattcccatgtgacgcgatgctccaatacaggttcagcctcggtttggtcattggcatgacgagaatggattccttcaatattccatttcacgaaaatgactcccgtaattaacggaatattaactacatcgtggatcctaaggtgaagctcaaaggtaggtcgacgcgcctttggaataaatatactcataaaagctgcaaatgcagtttccttaggaaatgcaaataaaagatttaagaaaaaaagcagttaatttagataattggttcatccaacttttacctatgtacagaatgctccagcgttcaattcttgaaagttcttagatttaatggatacaaaacacgtttttcatacaaaacaataaataaaacagtgaaaagaggagataggaaactaaaagctgcaaaacaaaaaaaacccgttttagttgttgaggtgaaatttccttctgacgtatcgaatcgcatactgtaaatcgcaggtaacgagatcttccgtcgcaggtaacaataatatgaaaactccaaaaataaacagtagaagtcgatttcttgccaagtataattattgttttcgtaaaggatgaacagcaaagagaacatacattaactcgctattcaatctcaaagctcactttctggatttgggcagaatggaagactgaaaagacatttacggcaagatgaatgtgattaaaaagaagagcgggtacaaaaatattataatctttccgagttgatggttcttttttttgacgttgcaattgttttaaaataccatcgaagtcacaaatggctaccaaaagttatagaaaattagtcagtaaacggagaaataatgacggggagaacaaatgcattaaaaatctatgctgttcaaactcttctcaaaaatagaggcacaatccatttcgtatccttgaacgtcgctcaattttgaaataacaaccatacggcaattctccatcagactttttaaccgtatagtatctgtagtagaaagatttcccgattgtatgagccttaagcaaagagaatccagtagggaaaataccttaaaagttgtctctggggaggccggaaatccaacaatagtgtcgacaaaaaagtcgatacctcgtagagtgaaattggttacgagaaaagtatgcttttccaaaggaatagaagataccacctgaaagtatggttccaaatcaaatgctaattcctctaatttttgatagccaccgggatggaatctaacgataccaatgttagcaaataaaaagagtgaagaagactaggcaaaacgaattgaaaaacgtacttcttttggtatttttgagacacgtctaataaaatctcatccagaaagtcgcgcaacttgtttaattggtgctcagttaattcaagtgccatagctgaatatagaaacagaaattccctttccaggaaaaaaaagggtcaagcgatattgataacgaactaaagatcggaaattaagttgctaattaataatgcaacaactaaatatacatgaataactatctaaaaagtcaaggaagcgtataagcttatacaaaacaaaatttagtttctgaagaagagtgactagggagaataaaactcaatatcgacaagaaaagcattaaaaccttatttatctaaaaaatcagtgaaaacagaattctgttcgcttttctatatgacggtgatgtttggagaggaaagagagtcaatgacgacgatttaggggtatacccatttatcaacattaaccttctacaaaaaaagttcttgagatagggcaattttttggaagccgaaaacacattttttataagaaaattgtctgaccaccaccataagctgaattttctcattattatcattttcaatgtaccctctataaaagaatatttattgaaatgtcatcgggtattatgatttagcatgcttgcctttattctgtttacgattatatttaggccaaatatgtcaggcgagtaaatgaagtaaaacatagcaatgttatttatttagaagggtaatttatcagacggatctaataaatggaagcagtaatcgagattccaagttggtaatgaagaaatttcttgattactatctataggcaactagctcctcttgcttagcaagtttttaaatagctagaagtcatgaataagtatccaacgatccttaactaatgcgagaaaatagttgatcataatcgaacgatgcgagctagattctaacaaaggtataaagggatatgatagtaaaagcggaacgtgaagcttggtcgattaaattcaaatgagctacttaagattatctgtagcaagctgtttactttcggaaggtgacttagtcttttgcctttcgttttgcaatatacagaatattaaattatttaatcttcatagctgatatctaacgtatatcgactagttcagtagctgtgataacgaagtttaaacatatctcagtattcggatttggtttggaggcacacactcaaaaccgactatttacggctttattactacttttttgcctaagcctttaatatatcgatatttgagaagattcaaggaacgagaaagaaaattttgtttttaaaaagcatcgagcctctctgactgctacactgtgcattcaatttgaactacattaaagacaacagcagcgctatcgtttgagcataagagcactcgaattttaacgacaatactgaattcttaatccttccatgacctatcttttcatctgttaaagcatatatatcttgcttgtgcaaagaaaggagccaggtccaaaagtccatttgaatagcgcgcattctaatcaaccataattttaagcatccattcccaaaatacaccttttcctcaaaaaatatctggtcttatttcctataattatttttatatcaatccttacctgcggtttttcattgcacttttcctctttggtttttctttttttttggtgttatacgctgttaattcatctttgttttcttaaatctcttagctttttgttttaaatctttgcactttcctttacatctttatagtgttccacattcgtttcgttctccatattcccagtttgctttttcgatttcatatcgccattttagataaaattgatgacatttatttagcgtcaagaaaaatacaatggctgatttcatggacatagagccatcctctcattctgcaaaagcttctcaatacgaatcctcggctcctgcgtcttcttcactgggtaattcgcatccaaacgagtctctggattattatatatacgactattttgttaagcacaactttgaggaagccgcacaggcttttttacgagagtcaaaaattcaaattccaaaatcttcttcatctactgccttttcaccttccaacaataacgcaccttcacctttccccccaaagaattcatctttagcctctcctagcaaaatttctgaatcgatttctggtgatcgactttacaaccacatgtcatcagctccgtctcccaacaaaaaggaagaaaccaatgtcgtacatgctaacgaggacatttcattagataaacgccagtcatttggatcatcatcccttcccccttctgaagtttctataaatgttcccgaaggtttcttggtggagtggtttaatattttttgggatgtatttagtgcgcgagtaagtcgtgtaaatagcacgcctattcaattatatgatccttctactcaaagacaaatggcccgtcccatgtctaacctccaagcatctcaacctgttccttcctccactttttctcgttccgctgttgtccccaatccttctcttcctttaaatccttctgttttacagggacaagtgatgaataacccaaccataccaaagggcactccttctacatccattgaaggtgcaaagacttctatcccaccttctcatgctatgcaaaatccgcataactctttccctgcatcagcagatagacttcaaaagaaccaccctgttcaatcttccaactttaacccgtacacacctgcaccttcgattactgtcccacctaattatataccgaacactgcaatgatgggcccttcttattcttcttttggtgatactgatcctcgtacttatcctgcaggaatgggaccaaaccctactgctgctagaaacggcttttatcctccaactccggcccagatacatcaattaaaggctcaacaacagcatctccaacgacaaagcaaacaaatgtcggagcctgctcctattaacatgaaatcgaacaaagatcaacaattgcagtacgtggattttcgaggtgttggtagtggcgccgatcttcaaaaacagcaatggaacaaatctacttctgctgaaggtctccagccaaatggattggttatgaggaatttcggggacgttcgccatcaaaagcttcctacctcttcacctccttcgcaacatccacctgtagggcagattccatcacagtaccttccttatcaggctgggctcaaagtgccaggtaatacacctatacccgttaaacaagtaggtggtatgcctttacaatcaccattacctgtaagtatgaagccttccgcagatgaccattcacgcgctactccaacacgttctgttgaagctcccactttgccgtcatacgctcctcggcatcctactcaagcaaatggatcgaggtatatgaacccttctacttctcggatgacacctcaatcaccttatatgcagaattactaccgtcctcatgctcaaatgcaggatcaaaacaacatgatgtcctacatgttaagccagcagaaagctatggagattgccaaatctagagaaatggctatacagcgtaatactcaaacacttagctctggtaatcagccacctcaacaatcaggacctaatccgaatgaattttcaatgtcaatggatccagctaatatgcagcaaggtaatcatgctcttagcgactatcatatgcaacttatgcttttggaggaacaaaacaagaagcgtttgatgatggcacgacaagaacaaggaactggttcactatctccacagtcctatatgaatagtcgctatagtgtggatgtaggtaaggagcatatgtcaatgatacctaatcaaactgctcctatgattcagccaaacgtaccggttagcgcaaattccccagcacaggccaatactccagctgctgattcaactaaatccgggactatccaaccgacaaatcgaaatggcgagggcttatcatattcgccacatcaacagttctcaccttctgctccacaagcagaaaagttaagtcgctcaatgtcaccttttgtttctcagcaacaacagctcaatcagcctgtatctaataaaccagatggactaactcaaaataaagaagtgaccggaatgccattgaataaggaagaattgacaaatcctgcatttccacaaagtagaacatcttggatgatgccgcagtcatttgatactagctcattgaatgcacctggtgcgaaggattcttcttcgttttcttccttacatgcgcaaccaggaaaaagtggaatagctacaatgggtgtcgccgacaatactatacgcacaaccgaacgatcgactttctctgagataatgaaagattctccctctgcacatgcttctccaggggcaaaaacaagccctaatgcatctagagctccagaaccgacaggaggaactaattccatttcacaagatactactcagtctctacaaatgcaatctaacagcgttaattcatcgtctatggtggatgcctctaaaagcaaagagaaaagtggcggcgatacatccgctttggattcaaatgcgaagaatgaacctacggcggcaaagccaatttctaaactcgaagatgatgctttgtttaacgatagtgctggaaatgcattcggcttttcttctaaaaccgacagtaatgttgaaatgttaaatgattttgactttgaaagtttcctaaatgatgctggtgcagattcggcatctgtttattattaggtgccgatttcctttcctacttttcttcaacgctacctgtggagacgttgtttgtgtaaattagcttggatggatgaatatttcttctttatttgtgtctgtttaaatttgcatggattgctacaattaccggttttttttttataattctcatcattaatcgtgccatccagcccgataggtgtattttacatgaagcttttcctgccaatctactacacccatcgaatttttaccatattgttgattttcgttatttataagataatgtgtaaataaataagaactgctttcaagcgtatataataaatatgattcatcattatactagcaggaatttttatctacgtgttctgaagaaatagttattacttaattaagtagcaccattgcataagctaaaacattttggaactaacgatttctgtaaacaatgtttgaataccaaaggagttagcataacaatactgcttgcatgatatgatttcacggtcagtaaaagcaatccaacattaatcaattacacaacctttttttctggataatgatttgcagggtgaagatgaaataagcaggactatgaaacaaaagaaaatcgcgaggggttttaatattgatcattggcagtatcgcaatttacagcagggagagacagctggaatttaaggaaatatgctgattgcctaagtttaattaattaaactacaacatgcgaaattgaaaaattaagcatcaatccgaacaaactttcagatcttacagaaatatgcgttttttaacacattgtttataaacatattttaatgaggccttaaaaaatagcattcaattttattaactatgataagtaatcggaaccgatagataatcgaaaaaagcagggttcgcagaaagactcggctatttgaagagaagggagttgtaaagggggtggcatatccaaaagccgtaatgatatcttttgttataacagaaacagctgcttattgcacaatgcacttattatggtaagcagccacataaaaaatcattgtttcgctatattgccaacaatcattacgcttgaggtcgatttcatgaaagaacatgcttaagcattagagttattcattactcttcattttcttatcaacgcgggattccaattcatcaagttcttcacgatgaagtttgaggctttccttcaattttcgaagttgctcaatttcatgttgatgaacaaaaaaatcctctttagccttttcacgggattcaaatgcgcttcgcttggctgaagaggcgtttgccaatgttggatcggtatcgctagccttcgacatgaaacgaataccacgatatgaaatgcaagctggtttcctgaaacaatacttgtacatcttttttatgataaaagagaaggaaatttccaaataaagatttgctcgatcctactaatggagtgggagatgggagaaagtgagtgacggaaactgggtgtgtcgagtagatgaattacgtttagtcgccgaaactcaattgtaggcgactttctacgcaccatccaccacatttgattttcattgatttcaaagacatttgttttttgtaccctcagaattttgaggttatcacgcaattagtaaattaataagatgatactatctatgcttggaaccgagagcaataacgccgaactttgagcctttatatttatgtagctatttacagcaaaatgctggaataaatgatggttttttatcgtttctaaaaatttgaaggcgttttaaagaaaatagtttaattatcaattcaagtagtccataattaggacttttctaaatgtaagtttcgagtaatctactccttaataagaaagtatgaataaaaaagtttaggtctataaattcggaaagataactgttattttagaagagccttattgtgtatattgtcattttgagaaatatataaattttgacagttaaatactaagcgctgattcagctgatttcaatgtcttagttccttgacaatagtaaaacaattgatatatgacaggtttgactttttaaacagattggggcacttacttggtacttggaaagtaaacattatatgatttcgccgcaaattactagtttgaaatttcatgaaaggaatatattaacgatggtatgagaaaactcatataagcgtagacaacgtccttaaatattgaatgtatgaataaaggagataaagtacggcctttgaattgggtatttattacattatagacttaaccgtgactatatgaagataacgaaggaaggttgacgtgaaaaaaaacgagcgacgatattctcttcacaaatcatatgtaccaataatgagtataatttaacaatgttacagcagacttgaagcttcgtatagtgaatcgaataaaacgccttttgctttctttcaattataagtaccaaaccccggtcaagggagcggagaacattaaaatatacgacgacgaagagcttgtcggtagtaggctcgttcctctttacatctatcaagagcatcaatattctcacgtgccctgcgtactaagtaaggaaggacttcactgataggtccacaagaaacatattttacaatgcaaaaattgggctgttgattgcgctgagaataagccaaagcataggtaatatcatcagccatacccaacaattgagccaaatagaaagaggttttcgtaaagtcaacttttttggtttctgccaaattcaccgattcaaacattgttttcttattgtgactagcaaccataattccccattttcctttacgagaggcaatcgggtcagaagcagaggcagggtcacctggagcaaatttggcagctgcggcaattatagcttccacagctgaatcaaaatctttgtctgtctcggcttttgtgtcgtgaattaagaatcttggttccgagttcaaataagcaccacgaacgagttttgcgcccattagccagccctcagcaacacatttcttgatgtggtcgtccataatttttctagatttcttcaaatacaactgataagtattatgaacgattgcaacctccttattgtattttctcattaagtcaactgtgacggcatgcatgcaatcttggaaataagtttgctcagcatcaataaagagtgggatttgtttctcttttgcaaattgacacagtttgtcggcatactcccaaaatttctttaattcgctaacttcataagttgataattcaggagacttcagatgctccaaatagttacacgctgattctaccggatactggttcaaaatggagttgtatcgttgtaaaaccagaggattaatgaatggggtaagcttaacagcgcaaacagttccaggcttataggttgccatatcaatgatgtgcatgtttgattcaaaagccttgtccgcaatttgtcgtaacactttctggttcttctcagaaggaacaggaacctgaggaggtactaccccttgagaagcgatcttatttacatccatatcgccgtccaagtcaacttcacgagagtaattcaaacaagaggtaatacctgctgcttgcaacgtatccatcgtagccatgacagcctgaggcgtctcgccaccacagaaatgtttgtaaaatgtatagcggcaaaacggattgtataaaaatgatagatggaagacgtcgcataaactcatcgcacctagcgatagcttcactagccaagctcgagaacaaatttcatagacaaaggcactacggaggacgctgaagagagaacggtgctgcaattcatcaggaaatcctttggcaaaaaacgcatcgaatttgctgtcattgcgaatcttaatattgccagctgttattaacgaaccagcaccaatacctaaaatgacttttcgatttctcaaaacaccggaagcaaggcgaaaggcacgcatattgacaaaatgaaaataaacacactttgttgataactttagtaagtcgtatattagaattcgcaataggaattggtttagataaaaggggggggggtttgttagattaggtcaaattaaaaactagattgaaacacttttgaaaagcccgacaagagacactgacgattcgctgtggctaattttatcactttcttgaaatcgtaacttttgcacacacgctcaagaaattaaaatgaaagagaaagcaaataattgtttttatgattcaatgactattttgacttcaagaagcagtaaaattacaatgacttaattaaagtggaggctagcgattcttgttcaaccactcagcagttgcaatacacagttgcttataaatgcgcaatttcaactttaaatatcaaattcgttccatgtgactgtccccccatagcgtatcatttcgataatctgcttccatccctatagatataactatgcctcaaagtatgaacgctgtgctatcaaagaaggtaaattgataaagcacggaccatgagtgacaaaaaggtgctgcgcacccaagataacgggagctaactcccaaagtcgcttaaagtcaatactgtaggatagatttgtgagataaaccagcaaaggtatctactttttattgccggttccgatttaagtgcgatggatttgggtaccatgtgtttggagaggttttgaacaggtttgatgttgaaggtttcaaaacgtttgaactttgtttaaggaattggatcatgctgtagcagtagacttggttgaaagtaaaaacatgttaaaagactagttagttttaaaaagcaaaaatcagttatgtcatttctatgaaattgtcgtctcaggttgaaaacgataaaagtagttgtgcatgcataaaaaaagacaatgcaagccgccttgaaaaaggtatacccacttgaaattcaaagcaagagttagtagttgtacatacgtttacaagttcggatggaaatgcgaaacaatcatccgcggaataacggaactcataaacaagacgagaaagtcgtaagcaaagcaaatacagcgctaaaagctgtcataatgctgtccatgaggaaaaaattaaattaaagaaaacagaaaaagagataagtaaaaaggacatcggaaacatttaattccagtcagttaaacacaattacattggtatttcagtcatgtccaatatttgtaaatcaaatgacatgaattactcgagattccctcaacagtctaagaaaaaatatggatgcacatgatgcatgcatgtaatagccgtgcaccctttaatgctatattaaacagaacctcaataacatgatgataattagctaattcggaggattttgatgcactaacgaagaatcggtttttcgttcacccgatccgtccaactgcattttagttggaagttggcgtgagcgagatagtggatgatataagaacagagaagagaaaacgtctaaaagtacggttagaaattcacttatgtcttaggaaacgtacaaattgggaagtcaatggtaacaaacttagtgaaagcaattgttaccgtcacaagtgcttgaaccatagtgctcaaaacattgatgaagaagcccttagaaatatctagcgtagaattaatggtatatgaatagttggttgtcaggaacattaaatgatgaaataaacctattcattcattagagactagaaatgataacgtggacaaagtccagtgttatagcttaccaaacaaagaaactgtaagcaatgcgtccaatgctataatcaaaataaaaagtagggaatattctgaagcttcgaattcaagtaattcagaatttgaaagtacatagtatgaccagaataacgttgataagataacacaagtgccccatagtcgttcacgactgtaagtatagtgaataccaggaaatttaagtactggatcaaattctttgtaaggaaaattaccaattgatagggaggactttgtaggagtgaacaagagcttgggtttggcttcacaagatagttcgtttacagtagttgcttcttcagaaggattttgagatttaggtgactcatttgtctctctcatcgtttcaattacatctatccaatctgtttcaagcgaaatttctttggtttttgatggtaatggctttttgttattttgtttcatattttagtgataaggatcaacagtaaaagagacttaagaaacagttcacgatagaatgagcaattggggaaattaattagattttttagtgaattggaaatttattcaatgattactaatttggtaaactgacaaatggacatgaatcggctttttgttctgaaaacaaagggttcacaacctaagttgggtgcggtaaataatataacgaataactgtattattccctaatgactgatggcagaagttgtctaccctttatttttgtatattgtgtgaatggacaggataaaaataatgaatattttgatgcgccataagaattttggtacatgatatttactagtaaggaaagatgtggatcttttatatcatgttcgtgcacaatactaaatcgttgaatcacagtgttaggcaacacaagttgtatctcgacttgggaatcaattcattgctactgttatcgaagattgttctcatggccactaatccattacgttctctacctttgcgatacaacgtatatagacctaagaaaacaagggcatttacaatttcatgcattgtgaaaagatgtattcttaattactaaatcaaatgaaaagcagagtatgaccgcggattaaattgctggtgaagaatactaaagccatttaaacgcatccagagaaaataaacagaaaaacgcttgtcttaatctttgcatgttccgttatcagctttgcaaataaaaaatataaacaaacccacgaaacgatacaataacaataatgtgtacatcctcatatcccataacaatgtttaagcatcattatgttaggtgataataatgtacaagcacttatattaagaatagggaaaagaagaaataaataaacgaaccgtaacgtaacgaaaagaaaaagaccaattatcgacattgccaaaccattaaaaccatacatacattcataactcataacaacgaattgaaccacgtgcacattattcctgcttggaagaaagcgcgtcctgtgcaatattgatacaaggacttctttgaaaaagagaagcaaaggaaagaaagatgtgcaattaatacagcgttgaatacttgtaatctgggtaccttacccataaaccgattctaagtagactacgcatgtagttttgtgtaagcactgaaccgtggtgtagggaaatcggcggaagtcattgatttgcgatggaaatgagctagatgttctgagacgagaaattgatattcggaggatacagagatattagatgtggtttgagtgtccaacttggtgaaatccaaaagatggcattcagaagagcagtacaaactgccatcctgagtggtggctccacacactgtgcaaaaatccaaatccatcgagtgagtaaactaacaaggaaaagagaacgaaaggcgtggttcgataacttattgagttaacgttacaagtaagtctgtattgattttctacgcaatacgacacagtataggaggatataaaaatgcggcagaggataatttaaaaagaagaaaaagagcctagtccgcaaaatgaaagaatcaagagaaagcgaaatgaaacaaatagaaataaatagaatcactatttgtcaaattaaccaaaccttaaagcaacctaagaatagtccgtcttcaagggagagatatgatttaagtaagctgattcaaaactagatgagcgttgtggaaaaaaaataaacaaacagtcactgtgatatgtttgaaaaggctttaagtaaatacgtgaatgagagagtgtgtataataaagtgtgcgttggtaaacaaacaaacaaaaaagcaagtgaaacccaacaacgacgctcggtttttttttaccaaactaaagatgctggggaaataataaaggtatgtaatgactgttgaaccttaagagtccgagtgctcgcatatatatagtgtgatagatcggtgcttgtttacatatgtaatcgatcaatctcgcatcactctgaagcgatgataagatatttgatgatcattactcatcttttctcatattgtcgaaataccgcatgataaggtcggaataagaaataaggataaggaagaaattgttacaacgttaaaaagcaggtttagtgtgtcgctggactacgtaatacatatgaacgggaaaaaaggtcgttaagaggtattgaaggaacgctaggtattaccgggacagaatgtcaaggaagtgtgaatgggcggtagacatatttgagagaacgaaaaaagggatttgaactattaaatgcatatttgggaggttgtttgtttgtttgtttgagtattcgtagcggattaaagagtcactggccgcattcgttgagttaacgtgtacgctcaaaaaattagtaagacgatgaatttggctgactgatcaaaaaagttacatcacaactgtttcaaacaaaattaaaaagaaatttctaattaaatgaatttcaacataaagtgattgaagcggatccgtggtttcctccttgcattattgtaaatgcaaaaaagcaatcgcatgatttactctaaggtttgcgactgttgtgaggaacatttcgtgagtcgccagtttatttgtatcacatctccttttctcaaactactgcttcaatcccgtagtggcaaaaacataccacagactcgggagacatttctttttcgccagtatggaaatcgcgcaatgcttatactgagcagtcatgatttcttcctgtctgtgttttatgattaacttcttattataaatttcactttgtcatgatcacccacgaattcaacattgtgttgtttatttcgcaatttctcagcatcaagcacgtcgatctcgggtcccttaatcacaatcacgcttaacttttgatctgataatttttgatctgacttcatataagtaacgtgttccttgtcggcgttgaggttaatcgcaatcatcatcggaaacagagatcttacccgcaaagtgtatgcatatgtttaagtagttaacgctttgtaaatgtatgtctccatgtttagtgcgagatgtcttagattctgaattgaattttatagtatcatgcaacatactatcattgattttttgcctatctatggatttcacaaaattcggctaggtgcttcctaaacttcaaactgatggataccgctaagattcgctgtctcgtcgttctatagcagccgaaggactataccaattagtcttttttataaagatttcgcgtgcgtttaaacatgtattcaatcgctttcatttgaaatacagaatgatgcatcccattatgttttgctgcagaaaacaaacattcttttttttaccgaccttctgaaaacatataaatcagtggattctaaatgggtgattaggaggaatctactgtatgcgtgttcagaatacaaagcagtaaacccattttgatgatactaatattcttcgacagggcaagcaaacattaaaatgttaaactgtgaatgtttagcaattctgagaagcccagccatttaagatcaacatttatttaaagtaaaattgaaaaccagtagaaaggtcattttgcttatattttgcagtttccaaggtccattaacgaactagcagcgacgtatcatgtacgagttttaatagaagataattcctcccatattctcaatgtttacggttttgcgggtttagctcggtcgtttaatgaaatttcattgatgaaacttcaaaggttagaagaagcaaatcatagattcaaggatttgaatcaatctcctttatgttgtagaatctttcaaattcggatcttgagacaatggcgcgttgtaaaaatacaacttaaaggcactataaaaatcgtttatctgaacacatcggctcagcaacgaatcacaatcattgattttgatattgtgccaaattcgcagttttgaaagctgattgtttatactaatatcgttacacgcatcagttttttcaaagagcattggcgcgctttttactaacgtttctcatcaaacgaattataattcatatactatcttcaagtaggtcgatacgattaaaaagatacaaatgacaatatttgaagcatacgaaagatggagaaggaagtagttaaagcggggcggattcatcgttaaggtatgcacaaacagtaagcagtcgaaagccgttactgaacttttatttacaaatatgataaagaaatgctctgaaaattattaaacaaggccattttcctcactatggctcatatattgcgtagcttgactagtagctaagcatataaatgcaatattatggaagatggaattttatatgtataaaattatacatcaactaaaagcaaatacaaaaacaatgcggcatcttctttttgtatataatttagtagagcaagtcagtcaactttggacgttttatttttttttggccttcattggttccaaataaatagcttaggtcgaaagtgtaactagcaaaggggcaacaaacacatcatttcgaaaatcgtacatgattagttagtataaggagagaagagaaggagtatgcacaacgtggcattgataataaaaatcaaaacaaccaaagaaatggctattaaaaatctcgtacactaatcgtcttcaaacaaaagcaagccattacgaaaaatctcacaagtgattgtgtggcgtagataacttctgaacaggaggatttgcccattcaaggcactcctctggagcatcatgagtgcatgtacaatcatcgacagaacagcattcaatttcttggacaaagggaagatttaaagcttcttgggcagtaattctttgttcggcagtgggatttgccaaacagaaaaacaaccgctgcatatgcatcggaaggtcattgactggtttaaaatatggcaaagtctttgatatacgaatattttggacatcgcaaatgagattgtactctctccaagctttacagtatttagcgtacaactggtcgttctgagaagctttgcggaaagggtatgtgcgaaaatatagacaatgtaaaacgatagcggtagaccacatatcagcaaaaaaggcattgtaagagcctggtgtcaaaatttcaggagccatgtaggggtcactaccaaaaatacccatactctttgattccacagcagtaatatcatcgccgggattgcacaaaacatcacaagcgccaaaatcagtaattcttaaaacaccatactcagaaatcaaaatgttctcaggtttaatatcgcgatgcgcaataccttgggaatggatgtagttgagaccacgaagaatctgcttaatcatacactcgaaatcttttttgccaagacgatcgtgtcgatcttcgattaaacttagcagatcccctctgggacaaaagtccataacagcgcaccacgtgtcactataaagaggaaagatatgagaatcaatgcacaaatcatacgatttaacaacattaggatgctccattctgcattgaaccaaccattctgaggcaagtttagcaatatactgaccatcagtttcgtcatcagccttacgacgataggctttgactgcaaagcgaaggttcttctcattttctttgggattcttaagagtcacgatgcgaatcacagccgtagcaccactacccatatccttggtctcatcaaccaatttgtattttgcgctcaatcgaggaacaacgcgttttgcatatggtggaataaatcctgacttcagcttacgggggatttcagaaatattggtcggaggttttataggataagtagtaggcccattgccttggttgccttcagaagaattggctgacgtcggactatttggagctgtattagccgaagatccaacattatcatcagacttcatggatgactttccactatagcctgggctaaatggatttgcagggttaatacaatcaaagccagtaccttgaggtgtgagctttaaactaccactaacagcataggtaaacatatcaaactcggtagaatgaggccaactctcgtaagatgtattggcataattgtcgcgaacacgcgatactaatggtttagaagggccaggacggtaggaagctccagtagaggctaaagacgacagagatgggctcttggacatgctgttaggagtgccagtaggggaggatggagtcggagatgcggtcaatggaccgtcgaaatagcttccattaccgccttctcgatttcgaatagaactattcgggctaaggggagagggcttctttctgtaaccattattaatttccattggtttagcctttgaaggaagttctgccgatcgagaaagtgattccttggcattaccattgggagacttggttgatcccaaattgtgagaagccgaattggcacgcctagggactggttttctagcagttctagaatttggaggagagtttttcaaatgttgataggattgactcttatggatatccgaagattttccatttactggagaggaagggtgggaggaagtattcttatgaagaatgtgattattaataaaagagccgaaccccttggagggactctcggaagtgggggaattagcattgcttttatgaccaggatgcatagccttttctaagagatttttaaggccagaatgatgaggtttatgatgacgcgaagcagatacagggattggagtagcgggagctgtgtgcttctgcctagggggggatttctgtggggtctgaagaggagagttatttccaggtacatgggccatcgagtcagtagtgtgatttacacgttgctcatgagccgaagatttgtaatcggagggtgacttaatttgactagaattttttctactaagaaagctgtttttgaacttggaaagccctttgcgaacaggagcaggagtcccggagccaatagagcgacttgaaggagactcactgtccgatctttcaggagcttgtgatccaatgtcgaaaacgggtttatctgaaggcattatcaagagaagaaaaagagaacttctttttatttgcggaaaaaatgaaaatagaagagaaagagtatcaaaaatataataaacgagcaagtgtaaacacgtctattcaagctctctttttctacttgttcttcctttggatggtagatggacggcgacttttaatcaaaaaaaaggtaaaaacaaaaatagaaaagaaagagcaaatacgaatttttgattacaattttttaaacttagcgaggaaacacactgcttttcaattgtgccacctctcttgttttgatgttgaatgaacaacgacaatcaacacggttttttcctctgcaaatcttaaaaataataatcactgcaccgttttgaaaccaaatatgtacagaaaactctattcaacagcgtgcaagaggtagggttgcgcctcgaagtattaaatcgatcaagtcttagaaaacccgaaagcacaaagtataggtgaaatttcagaattcccaactctgattacaccataaatgtagttgttttatacaattctaccttatcaagctagtgtgaagatagcttcacgtacaagcgtagaaaccacaaaggcgatggtagttgctgtaatcctttcgtaccaagtagggggagggacggtaaggtaagtcaatatctaccgctaaagggtaatatggattgacgttgtatgcaagggcaagcttaacaagactttatttcaactccacttatcgtaatttaatgagatgtgacgttatggacaattcaaaaaaataaaaaaaggctccgagtattcctagaattttttccaaacactgcttttcatacagccaaccgcaactttaggtaaaaacgattgctcctcgttaacgcaagtagaatagaatagcgatagatcaagatgaaattaacccaagtttgaaggaggcaatttacctacggaatgaaaagtttgttataatgaaagtgtgggaaagagacaaagtagggtgccacagatgagaaggaccaaacaatataacgattgacaaatgcccgtttttttttcttttttttttttctttgtttatgattcggctttaaactactgcaagtttttgaagcggcacttgaggcgttaaagcattaattaaatcgctgtgaccggttagtgacaataatggcaactaagtcagatagcaataaatatggtaagagcaagaaggaccaaagttgcgaatttgcgatggagcggatgaagaatgaggatagatccgttttagatttcccaaattctggagtaagaaaaataaaatgtggttttaaaatttcgtaaagagagtagcaattatatgtgcttttgtattttcgtatttttccttttatagaaatatcgtgtgtttactgatatatgttttctttaaaatttatgaactacaattgcgaaaattgattccaaactgacaaaacgattgatagtgagaattgttgaatcaatagttgtttaaagaggaagaaaaagaaagtggaatccatttatttctttgtcattgacgatgattcgtttagcagcgttctgtaaaatgagtagatactattcgtcaatatggaaaagtaaataaatcctccaaatccgtcaaaccttgtgcatattttttataacgaggcaaaatgttcaagaaaagttctaaaattgagcatataaaataattcaaatgaaaaaatgccatttcaatataaaatgtccggcaacacccagtaacttgcacgtggaagttgacttcttttttcaattgaaccgaagagcaattttagcaaaaagccaactgtaatgttgcagatatcagaaaaacttttaaagtagaaaattttatcttgaaatgttaagctctgggtccttagaagtacagggtttaattacatacggctagtaaaatatcggaggattttgaagtagctgttaatttatagcagaaacgtcagcaattgtcaattgattcgagaaacaaggtgttaaaataattaaataacccttggatttagttactaactgtttttaacaaaaattgtttgaaatttttgctggcaaagcattctgtcaaaaaaaatggataaatctgagtattgaagaagtgataaatggaattaaaaggaatttttttcccttcacgtatgagccaaaaagtactcatcgatatagaaaccgtggtcgatttatcgtaccaagaaaagagcattaatcaatcaacgacttggttttatttaagcaccatgatgaaaacatgcgtttttttttaagattggtagaaactgcattaatccaaccatgaatagttaaaatttcattctaaaatttgtaagattattgtagtttatgctttaaataggctccctactaatcttgttcgcgctttctataaaaacagtaatggctaataataatctgctaacatgtaaaatactatttctttttccccaattgctttttttgattaagcttaaaactaataacatgtatcctatctcaaatagctcgagtatttagtataacgcctaactgatttagtttatgagaaattttatgcttcaaatttacatcttacagattctatcaataaacaattgtttgtgtcgcttccttttacagatataaagaatcaaataagtatttaaaatataaaaatttaactcagtttccacatgaagtttaatatatacattaatattgtgagactataacgtgttttacccatatttcagtaatttgtatgatttgtttttgtgacgattatagcaatttactcttgctcttgcaattttttgtttgtattttgttttttgttcagatatatatatatatagaaatataaatttgatatgggctagcgttttaacatattttttgtccaatgccacaatccccaattcgagtatactcacatctctcttaaccagtttatctaaaaaagtgaatttgctttgtggctacttctatttcttctgtaagtctttaaaaccctcaagttattatatagaaaaatacatgagatgagaattgaaataaattgggcataaagatacatttcctgttagacgcatcgtttcttctttaaataaatttgcctttcgatatatgcaaatgcatcaatggagtgctcaatttctggtcggataataaaccgagcttcctatcgaatggtgtcgatataggaatattaacattgtgatggagttgaactgtaaggtgcgccataatttacgctgcaatttctttttttcttaaagaacttgtattatttatctaaaatttataatttaagtttgaaacatcttctaatcagacacacattaatcgttttggtcttgatttgctatgttgaggcaatggcgttaaaccgcaaatccgtgttctcaactatttctagaattctcatttcaagaatttgttttaatcaataagtgaaagttatattaataatcaattttagggtgtttagatgtcgactaaagttaagcagaagcaaaaacaaaaacatcggccaaagcctagtttggatcgctctgattcaactaaacgtgcagctcgagctgctcgattttctacgaccttagatgcaaattttcaagccttaaaaaagaaaaggaaggatgagcaagagtcttttcaggcaaagcaatctaccaattgggaaaaaagttctgttcttgttggcacttgtaggcaaatgtgccctgagtttgaattagaggaacgtaaattacagcatgctattcacccatacgagctggatcctgtgtcaaaacaagctcacccaagtttagccgtaaaggcataccatcgcccagctgctggtaaaggccctatattaccatcggatgtgcgtcctccttcaatccttaaaaacaccatagactatttatttaaggtgattttagacagatattcgttgcgagaagcacatgcctttgtaagggataggacacgcgcagtacgccaagacttttctgttcaatcatcgttttctcaggattctgtttattgtcatgagttaatagctagatttcatatcatatccttacatgagcttgctcacactcccaacttcagccgtcaacaagaaattgaacagctttccaaaagtatggagagtaattatagtagtttaactatttgctaaccattagttttgtatactcttgggcaactatatgattatatgcatcttcgaaaagagcattgcacccatgaagcagaatttcgcgcgtacatggtattattaagtcttggagatccatccgttggactcgacaccttatcttggcccgattttgtctttaaaaaacctattgttaaaacatctctcaaattgtattcattggctcaaagaaacaatcatacaataactacctcaaattctataagcttatcattggtgtcttcatttaatacggaagctacatcaaatttatatacccgtttttttaaaattgcatcgagctttcgagtttcttatttaatgggatgcctgttggatttatttgtaccctccattcgaactggcgctttaaaagcaatgaaaaaatgttatctttcagcccattcaaacattccctttaaagatttgatgaagatactagctgccacttcagaagatgagcttgtgcaatgttgtaagatgcacggattaaaaattgaatatattggagagcagccctccgcagtggttttgaacaggaaaactgtaattacaggtatgattgtagttagttgatttataactaattttttaaacagagcctttattatctagtgaaatctcttgcagatttgctgatgagaagaaacccggtacaaacgtatcagatttaatttgtctagatacggacggttcaagcttgcacagaaaaaaaccgaaattgtttaaaaaaagaagcattgtgcgccaaaggtagcaatgtcgcgtatgcattttctaataatatttgggttacaataaatgatacatgttagcttttgttacccttttgacaattttaactgaaggacaattgttttgatgggagataaagtcagctttcaaattttattgcgttgagtggtagtaatgctttcatggaatgtagataacgggcagaagcaatgtagagtgaaaattaaaaactattataatacgtctagggtttcgtgaatgttaacgttactaactaaatccacaatctgcgaatgcacatcctctaacgaggaagaggcatcaagtgttataaattcgagtccctcttccctaaactctttttgtaatctttggaaattttttagaactttctcctgcatctctatcttctcatatcgttcttctccatattgtcctcgagttgcggcaatacgcggatcaacatttagaaaaattactaaatcggggcgaggaagaccacgatcagggcttttgcaccattcccaatcgagtccctacttaatgttagtaacttcatatatcgtctatagagtctatatcctcagtcttctgtaattcacgaattatccaagaggagataatataccttagccgcagagaatgcaataccagagaatgcgtatctatctagtatgcaggttacacctttgttgatttgctcataaatatattgaatggtttcccatctattggcagaaaaaagcagatgtattacttggtcattcagctggaccgattcctttagatagtcatcaattttttttccaattgctgtagttctgtctatcgagtaaacgtaacaagttagtcggccaagaaacagaaataactcttaccaggaaatttgaaaagttcagccttttcatgttgagaaattaacttatcaaccaaaagctgacattgggtagactttcctgagcggtctaacccttcgataacaatcaaacgtccacgattctgtttagacatcaatattaggagttcttggcagattactatagatatttattttttagtttctctaatcatttcaatcttcagaattatcgaataccttttgactacaaaaagaacgacttgctaatgtgataaaagctggtagatccagcttacgtagctaagagtacatataactcgcgaaaaatgggtaaatgatatgagaacaaaaacgatacattaaactggcttcattaaatttataaaacgaaagttaactcccactatgttaccacgtaaatggagagcacttataaatgatgtttttctctaatgggattttcatatgttaaatcaaaaagacataattcattgtggtataactagagatgaagaatgaattactgtaagatatttgtgaagtgagaatacgcaaaagtctaataacaaaatgctttacttatgttaacttgggaattatagaggaataaccttttactccttgtgggcaacaaatctcaaacgacgatattgtaggaaccatttaccatcgctcctacagtcagtcaccaacaaggcattataaactgtttcacgaatgatgtccttccattgtggaaaggcgtgatagaaatgctgtgcaaaggtatctagccattcacggacgtctttgttaagaagtgttggtcgagaaatgttctcaacgtattcaacatggaatccggcctcttccaacattcgggtataatcatcctcagagccaaaaaaccaaggatttgcttggtcaatctgctcctttgtagctccaagagcaagtagaatagaataaatgctaccaacaacctctgaaacgttgccaaaagcaccacattctgcgacgaaacggcctttggtgcgcagaacccgagaaacgcctttcattacgataggacgattttttggttgtcgcataatccagtgcaaagcagcattgctgaagacaacgtcaaaggattcggatgggatctcagatgcatcaagcaatttttcgcctggaatgacatacgcattcaaaccaagttcacgagcagccttaatcatgtccggactcgcgtcaatacctaccacccgcctgcactgcgaaactaattcgttggtgagaacaccatcgccgcaacccaaatcaagaagttcatcagacgatgacaagtttattctcttaacaatgtctttcgtcagttttggaacgaaagatgcatttcgctgatagtcctttgctgacctaattcaattctggcgttaatatttaacacattacgaatgcatgcttaccagtaatcctcaggcattatgatgattgaaatttataaaaaattcacgaactagtaacaaaaaaatatcttctatatataataataattgttgtccttatattgaagatgaatcttagatacggtgttaacgtggttctagtattatcatgttatcaatatcatcggctctcaaatgtagttcaaataactagaaacagcatgaaacaataaaggttaggggttccaaatttcttttgaacaggaagaggtgactttttaagaataaaatccgagaaagaagttgaaatagatgtagtttaaaatgatttttttcgctaagacagtttaaagaaataaataaatagatatcgtttcacaaggtcataaaacaagaagcagtacattaaatttggtttcataaaagttaagaaatcattataagattttaaaaaagtttgtgtttctatagtgtcttcatataggcactgtttgaatacaagcattaatttaagtcaaaacatgatgaaccagatgtttgaacttttgtttaagttcattctttttggaatcaggttgggtaatggggactaatgtttgagcacgcatggctgcaggtctgcgaaaataaccattactggcagccgcacatagcaaatttgaagaaatgtctttctttaagctcactgagggtttcaaggagcttgaaggagccaacagagttgattcagtaagtttcaattgtttaacagaaggcgattgagatttcgatattacagttgattctatcacctcttgctgtttcactggcggtttcgaatttgcattaacttccttgttttcacgtttcaaggatggcacagttttcaaatttgagactcgagcagctttctcattactggcaggaacttttccctctgcgacgtcttgccaagcgcgtatggtttctaagggtcgttcatacttccaccgggtgggattattcgtatccggctctggaaaggatgttagtgagaacatggaagtaagattataaaatgtgacaacttacgacaaatacttcttcccgaataatcacgacggacatgcgctttgtttagtttagtggtttcccgatttacccgtgcatacggttccaattccaccaaaggaaagtttagtttctcacaaggaccacctgcttgctttctcattgcgtttgactttaaaattcaatcaattcctggataaataaaactttagaaactgtgtggttgaaggcaggttgaaaccgcgtcgcgcgttttaattatactcagagcgggtgctagcacgaatcctctaaaaatcaatgaagcccaacttacgaacaaccaacattcaggtttttaagatgttataaaaacgatgaattgttatgacctcaaattgtttgttttgaattttacttgttggcaatgatccgagtattctaaaaggaaagaattgaactcttaatgttgtaaaaataaaaattcattaagtttgaacgaataaatttttacaatatatcagaacgaatgtttcttgaacagtttgaaatgttgtacttgtataccgtggataaaacgagtaattttcagccgaacgattgcagttttcagtttgttccttaattgcaaataaatactatcacatgtttctttaaatcatatttagatactcctgttcaatgttgaagcacctagaagcttccatctttttcaatactcattgcttgagcggtcacccttgactattttcgaaatcaaataagttgccaatatgtattctttgatattctatttatttagagtttctaattctgttggttcctgtttgtttaatagtattgttctctacgatatcgctcatcgattagcaattaattaggctccgttttagaaacttcttgtcgattctaacagaaggttaaagaactaaattttgaatggctcaattcacgatacggtcataacaacgctatttcgtcaacaaaatttcaacggtcagttcaatgatttcattatccttcaacaattcatagaaagcgatgaattctttgcgcggtagcatataagcttcagtattatcaatttattctttctttaaagaaaataggtaatttttatttaaaacagcgataaattgataagtttcttgatatggtgaataagcctcgctacaacaccacagtatctatcctttccacatcacaaccctaattacaaattttcattatttacgggatttaggttgattttcggtttacattttttcttttgcattaaatagaatatgtttttcattgtcgctgcaggttttgtcatcgcagctttaattgcggctattggaatggcgatcaatagattttttgttcgccgtcgacaggcaagggctggacagaccaaaccagcaactacacgccccatggcagaagctcgcgctaggcctggcgcaacagcagttcctcgccgttcacctacatctccccagtctgcatacgttcctgcaactgtatatacatctccaattggctcacctcgtcgtggctctgttcggtatacacatgtaatggcacacccgaatacaactactaccgtttctgaaaatttgcctgaagaagtcccacctccatatagtccagctgctactgcaagcaatacaccccaaaatgaagcaagccctgcagcaaccgaagctgtaaatcacgaacgaccagcttcaccaccaccagtttacagacctccagaggaaatggtttagctttgaatagaaatgagcgattttctacagtttcgttaatcctttctctttttctctttacgaaactaatttactttaattttattatccaaaataaatccgtttgttaactttaaaacggaatcttcatgttgaattattgctctccgatatttctccatgttttacttttgtcattcaatgcttcgatatggcgattttttatgttgcctttagtttatttatttgtggtaaaaaagcagggattttttacgaacatgattacgaatggttttatggttttctttatgaatattcgatctggacttcaagaaactgatacgtttaatattccatttcgtgggttttcctcttttattttttaagttttgtgcattctatttactcttttctcctcaagtatcacgcatgtttccttggacttaggattgtttataactttgtacttccaaaaatttgttaagcatctgttgttcatttgtaaatgtatgttaatgatatatttccatgcgaagaataatgatggcattaatattaataaaaaataatttctttaaatcctctcacgatgcgacctataatagataattaatcatttccgcggtttctaaattagtattccaaaaagtaagactagccacgttttagtgactctgagtcagcagtatagctatatactctggagaaaacatagtcacgattgtgagtgagtggcatttcgttcgtgaatgaggtataattatggatggagtagaaagaaatccacttaagccttattccacgaacttgaagtttttgaacgtatgtataagtttgacttgcgggatacacaattagcatttctccagaaggagtcattgaccaggagccagtgagtgctacgtttccattactaaacataggagaactcgacataggagaaaaaagactggtgttttgcacactgaagttgcgaacaacatcatttggttcattactgctttgataaacgatacatgttgaattaggataaagtcgtaaataccggtagtatgtgatcaaatgtatgggttggttccagctcgtgtcactagttccaggtcgaaagtatcgacaaacggatatgtagcatccgtcaaaacgagatcgaggctttttaaggaacaaagtcttccagctttgctggtatttttccacgagttcttcctctattgacttaatagactgttgccattctttttgttcacaactgcaataacaaaacgatctatatagagaatctgctcgtaatgccttcgcaaaatgcttacaagttagtgcaattgaagagagatatcttaaatcatgaaggtccctaatgcaattctctaggataactagcaaaacctcgtcgggaagcttcagtatattgggaacgaccgactcatttacagactcattttccgttaacgttggagatgggactgaggaaacagtgagcatagcttctgatgcatctgaatttaacatttcctcctcttcatttcttttacacagttgcaaacgctccaaacgccgatagatagattccacatcttcatggactttatgagctaatcgatatttattaagagattcacctaaatttccttctctttcagattttatagcatctttgtaatgtaaaagtgcttttttcaacagtatatccttgttcactgtttcaagttcaagagaaagttgatcctctactgtactcatcacttattttatttctcagacgagcaatcgaaagtagatgtataattgaaaaagaaaatattttcttacttatttctctcaaaatagaaaaaaaaaaaaagaattcaacacgaatattaagaggttaagatagtgctgaacctaactaatgacttttatgttttttacttttcatacaattcctagcaaagtattaacaaggatttaaggattaaaagcatcctttcacaagaccttactttggtaacaatatggtttagttcatgggtagttagccgttgcgtttaatatcaagttgtggcggtttgataacaagaagaagaagattaaattgagtcaatcgtcgcttctttactgtttaaaaaatggactagataaatattgtaacatgtttgagatgctatttggctatgggcatatttgtaggtgtcttcgattctatcacttctaacaaggcgttaggacttgcgaaaccattacataaacttaaaacttgttcaaatcaaaagttacttggcaataagctaagtggatattaggattttagcgatatagaaaacatttcgatttgatgaattattgtaataattaccagcttcatgtagcattactgcatttatttatggtgaatatgatagcgatttttattgttaataaacgagtagatacatatcccgctttgctttcggataattctcagcatatcttcgtcaaaagcaattgagatttagatatggtttcgggaacacagtcgaaaccaaactcattgataatgtacgatgccttccaatcgctatatgaatcttgaaataagtataaaaaaaattatatattgaaaacatttaaaaagcactgtcaagttaaatcattcaagtagctatttactcattcgctctcaataaataaagcaaagcggaatggtccaaataaagtacattttaagctattctattgttttaaagtagtaattttgtagctctttcatccaaaaatccaaatgacccctaattcctttttaaaaaaatttttttcgtattcttttaaagaaattcaaaaacttcatgtttaccatgacacatgtttgatacacgctgatatcccactatgccttccaggcaaatagaatcaaactttgtatacataattctacactttgctgcatcactgtcaaggtttccttcagagatggttctcatcggcattctaacaagttcaacataaaactgaggattcgttgggggaccatacatcacaacagcttttacacccctaaagtcaaatcgacggaaatggtgagcgcgctcagtatatagcattatattggttctaccttgataaaaaagattgcgggctctagtcatatcggatacactcgaatattctgatatggcagaatagttaattccctcctcatccatgtaatttctcacacgaacaaaatcaaaatatgaaggtatataaactaaaataccactctgggaatacttctttagttgtactagtatagaaccagtaaaataggaaaagcgggcatctggaactttaataatagaatcgacagaaatgcgaacaaaagtttgagtcactttgtaccccaagcggtttaaaacaccgtgaagaagcgagcgaaatttaaccttaccagcaatatttgacatgtagtgagaaaagaaagaatttatatctagattgttatattgagaaaatagtatagtttggcgcatatatctggcttgctgatcaagataccaaggacgaacacgactgaaatcacaaccgtgagcttctttaggcaaaccattaagttcatcaaaaatgcattcaatatgttcccagttttgcatcacgagagcatgagcttggtcaaccattgctatttcaatcgaactcaaataatcgaggtctcgctttttatctcccttgttaccaatagcaagacgaagtcccaaaggactagcaactataatgtcagaattgtaaaactgggaaaatagcttgacagtttttcttgtaaatttaacacccagtcgaaacatatcgtcggtatttccggaaaaaagataacgaaaatcttctggctttttttctgaaatgacttctttttcaatcgagaattcattatcaaaacgctttcgattttctacttgattagtcccagaatatgaaataagtaaattaatgaattcaaaagcactattccttgtgggtaaaagaattaatactttaggcctggtgtatccctgatcacgaaattctaattcaggattttgagaaatgcgagcactattttttaaaacacggtctcttgttttgaatacatggttcaaagcatgaagcgccaagagtgaagtccctaacttatggcttttcatggacatgttagtaaagaatacatcttgataattgaacattgctttcgctaactcaatttgcatggatgtaagttgcccagatggcttttgctttttataggagtccaatatcctctgctttagtcccaaatcatcaatattctttatttcgctaagacacgagcaaggcaatctcttggtcacatccggaaaaaacgattgtgacactccaagtttggattcctctatagacttacataactttccctcatcataagcagcaatagaatttttaatgacttctgagtcatcgtaatcgaagtgttgatgaaatgggtcttcagatgaatcttgagcttcttggtgcaaagtctcatcggcatcctgagattcaacattgatgtaatattgtattgcttcttgttcatcgttttcgttttcattttcatcttccatttcaacttccatctcatttaaactttcaataactttgttctttttttgtactttcttcgatgacttttctttatcatcttttttctcaggttttctctttttatttttattcataagatataataaagcctcataagactttccagccaattcatccatcgaggcaccgtctaaatcactttcaattgccatattcgcaaatttgatgaaatcaagttatagcctaacagctgaaagaggaaataaacaaaatattttttcaaaatatttttattatatctcgaagaaaatactcgtaaattttccagctttcggtaccccaaaagtagttggttattttcaactgtaaacagtggtaggcgaaaaaaaatgcaaatcagcaagaagctaatcattttataatatagtacttccgaacacaaagtttaattgatattatcattattattattattaaagacaaaataaatagcgcttaagcaagaacaaaacctagagtataactatatgcatgctacatctacagaaatttcagacactcggacacggaagattgtgggcagtctgccaacaaatgtttcatagtgaccgattaaaaatttatcttttctcaaaccgtttcaaaaaaaggtaaggaaattacatagactgcaatgcttatagtaaatgacggttatggtccacacaaacttttttaattaaataaaacagcctttaaaaagccaaaaccaacgatacattaataaaagctgaaataaagtagggctgaaaaaaaaaaaacaccaccttggggttaaccgaatccaaattcaaattcgccaagttctgcaactcataattagttccacaaaataagattatttcctaaaaattgtaaccttcataataaaacctgacttgttaagaacaaataggccccttgagcctttctgtatataactaaaaatcaaaaggtagtacaaatccaaaagcaaaagttaaagaaacacattcaatgacaaaaaatagcatgattctgaatctaaagtaaaaaatgcgtttaaaagcatttggattcagattgatatatgcaacatgtgttgaatgttaaagaaaaaggatattaaattaaggaaaaaggtaaaaaaaggtaaagccatagtagagagttgattaatgattttcttcagtcgctgaagagcttgaagcagctatctcattgccgacacgaggtaagtcataatgactgctagacctacgttgcatccaacgattgataccacctaaaaatcctgtgggaccaggacttgaaggttcactagagccgtgcagaggattcttctgcaattgataatcggtagtcgccattgacaaaaatgatttgatatcagccttcagatcacgagttgtagaaacccagtgatttctcaatgtatcacgaagaaccttaatgtggtgtctaagatcaagttcattcttcttaaacaacgaaacgtttaattcctttcggtttacaccgcgagcaaggtttcgcatcacatattgatcatagtcccgaataattcgagtaatgagatcggatgtagaaacaccctctgtacgctttgtaggaataaatttaccaaccttcttaaccggaagatagatatctccggaatcatcgctagcatatggaatgtcgtcgtgggcgacaaaatcaatcttgtgttcttccaaaaattctggggtaattacccaaggtgcattttctaagacctcgtcaacccacttacaatgtcgaagggcttcagctcgttccttgtcattcatcactgttaatcctttaaggcgatgagtcaattgatcgttgggaagaccaacaataagatgcacattaggaaatacttttttggcctgttctagttgtctcatatgcccaatatgaaacaagtcaaaaactccatcggcgtaaactcgaacaggacgaccctcaggaggatcattgatagggtaactaaaaggagtggacagctctttaaaccgaacatcacgaggctcctcctctacaggtgaaactgattgagatatctcttccaaagatttagaagggctttcctctttatcatcttccttctcatctttcttttcttgttcttcaggttcatcaatctcgaaattatacttcttcgtctgtctttctacattatcttctttttcagatggttccacttcatctattcttcttttgtgagtatcatttatcttaataccttcttctcccataattgtcaatttccttaggttgtgttacggttttgcgaagttccggtttgtggtgcagtggacacatacacattttagctaaattacaatacatacgatttttatgctgaccataaaaaaattgttgaacgctacaaagacttaaaactcattattattttttcatttaaatctacagcagtatataagataagatggaaatacttttctaatgtgatctaaaatagtttattctaagtattgaattcgatacagttaataacaaaatttcatcgtgtgctttataaactcgtaactaaaatagacaaattagcgagttttggggtaaagaagcaaaatattgagtaccagatactcttagagtttggccttggagtgattgaaaaaggcgtcgcagaccaaacgacgttgcacttttccagtagcagttttagggatacgatcagtaaagtaaaactttttagggattttaaaagcagcaaccttctgttctaaatagtcatgtaactgcttgggggttactgtttttccagcaacagggttaatagctgcttggatgtcttgtccgtatttttcgtcaggaacagcaaaacaaacagcttcggaaacatcaggatgttgcattaaaacagcgtcaatctcagctggagaaatcttttcaccaccacgattaacaagctccttgatgcgaccagtaataaaaacgtaaccgtctttatcaagtttgccctcgtcaccagtacggaaaaaacgatctttggtaaaggatgacttattcgcagcaggattgttcaaataacccttggtaacgttgattccgcgaacacaaatttctccctcttttccttggggcatttcgttacctttctggtccaaaattttgagttcaactccaaaaggcttaccaactgaatgaggtttgtgtaccaaaggaggtaagggattggtagtcatttgatgagaagcttcggtcatagcatatgcctcaaggacaggagcacggaaggtagcctctagtttgcttaagactggtggtgccaagggagaagagcaagaacgaatgaaacgaattcgaggaagaggtttgggaggaggagtacggagaaggatttgatgaatagtggggaccgcagtataccaagtagcaccatactgaataaactccttccagaagctgtgagcagagaatttgggaggtacaacggcacatccaccagaagctaaagtagaaaggaggccacaaagaagaccgtgaacgtgaaacaaaggcatgacaacgtaagaagtatctcttggatccaatctataagaggtagtaatgttatggatgctacggcacaagtttttgtgagtcaaaggaacgactttagggcgtccagtggtaccactagtatgtaggacaagcataacgtcgtcgggttgaggaagaccaagtggttgaggagcattaattttggctccttcaaagtgaacaatgcgaactaatcgagacttgggacaccaagcaagttcggccactgcgacagacaatttcttagcagcacgaacagcaggggtatttgcggcaacggagccttcgggaacaatgacgagtttacttttcagatcatcaatgtaaaactcaaactcggattgcttgtagttggagttcaggggcccacaaatagctctttgccaagaaacagcgtaaaaagctacgacgaattccaagccattgggaatagcaatgtttacagggtctccaacttttatgccaaggctggcaatttggcgctgaagatccataatagcaattcgaagctcactgaatgatagttctgcatttaaagaaggggctaccaaggctctcgcactagcatcaccttgaatagctgaatataaagtagtaaaagacattttcaaaattctaacaccaaaaaaagtttatatatgataaattaaataagtagtaattcaaaagtaagaattacaatgtttaacctcctcaaatgcggattaaggaagcagcaaaaggaatgagtttacacggaaaatgagttaaaaaatcggatagataggtaagacactagtaaagctaaatacctaaaaagtttttcaacgcacgaataataaagagtttcttcaagaaaaaactactcaagtattgaaaaaaaatcttttagacgagaaatcttgaaaacttccctaaatcctttgtaattggtttttacttgtatatgttagtcaaatgtaaagtgagtgttgaattaagtgattaaatcttttattgcttcattaaaataacgtacaatgaaccaactaaaatattcttcttttaatgaaggtaagtttttgttaagttgaagaaatcaagaatacagtactagacccgattgcaaattagatcccctaaattgcgcaacagatctaggcgcgaacgcaatgatttatccggtattcaaagggaggtggtagtaacgaaatttacggtaagagtataacaagaaaaatatggattccttattctggacttttatagaaattagttaaaaaatattgatgaatgaagaatggcatttatggtggttgcatcgaatcgaattcattactaatggaattgatttgtctacattagtgattcttcctatcttttgcaaattaaatgaattcaacggaaatgactcaaaggtataatactaaagcacctccaagaaaaaaaactaagttggtagaattaaatttctgtttttctgaatttcacaaaactaagcgtttcaattgagaaagttattcattatctcttttaatcattaatttcgctattatgtataaattattcttcataaacttgacttatattagtttaaatcgatcgcatttgcatgcttgcaaatgcttcgatactttccatttgtcaatttttaaaattaatgtaaatagtgctttacagcagattgaaaaaattgcttgcacttaattatctacttaattaaaggacgctggaatatacagacaggtctctccgttctcaatctaaaagggattcatccagtttagttgtaatggaatcatttcagcattgtaccaagtatcaagttttttactggatgaatataaatataaattaattgaagtagttttttttttaaatcgagagctatatgtttgaaatgtgttagtgcttttgttaatatttcccaaatagaaacggtcgagaaagaattattatttgacaacgaatccctcaagtaaagtaagtataataagggaatcctaaatattgaacttccctgagtaaaaaccgttgatgctgaatcaaaatattcctatttcgggttcttttaaactttttttatggaaaaggacatgttccttaaattcgtcggctaggtaaatgttaaaaaatttatgcgagattacaatgtcaatgtcacttgataaagtaatccacagtaaagtttacaatgattaaacagaacattgcaaacgatgtttgaagttatagggatttttacgttgaaattaaacgggtggtttgtcgcctcaaattcacatggtctatctctgatacgtccgatattgctactgattttaggaaattatactggtttgttgcattcatcaacgccttgaacactgaattaaatcttctctttttttaaactaattcgcacttcatatttcccgctatctcccattgattcataaattagtagcgtgagcatatgcgaaacaatacctgcaaaatatgtggattatatcatctaaataattattagtattcactgcaaagattaaaattcctttttcttaaaaaatttattatatatacatacgtaaaattctttcctcaatttgatgtcttaaatttggtggtttgcttgaaggcatattattctcaagataataaaatttttttttttttttttttttttttttttacaaaaataatattaaacaatcatgctcagtcaaatttcaagtgacgaattaatttttggtatttattttttaatacgaaaaggaatatatacaaattgcgactgcatctaatatagttttgaattagctaaagcagtagcataatttttgcactattaatttaaataaatattattacaatcaccaacattatacaaatgttattttcgattttatatttacattcaatttaaaattcatagatttttcactgttaacgacagctttttctcaaatattaaattttggactatattagttaaataataaacgcaagtatataccactaagtaaaaaaattacataaatttgatttttgattgactgtttgctcttacctaattaatcctcttacctatattgtctacagccttatttttttttaattcatttttgtggccaaaaggctttaaagtcttaatttacatgaaaataacctttttcttcttttaatttcaagaaaaaattgtaaattaaaagcaaactacctgcatcttgtggtcaaattacttaatccttattaaagttcgtttttgagtataagtacgctaattgctagattgaaattctactgaaaattattgcatattttgtaatgcttacattatttttagatcttgctaattacttgtcttcttcgaaacatgggtgatatttcgaagcacaatattttttcccttcctgaggatatcttagcaaaactagaactacgagaggaatactcagttgaggaaaaaactgatagtgctaatttgtcaaaccaaggcgatattgttgattccactcagaaaaatatatcatcatgtgtcaattgccagattgacaatctgcatactctggacgaaagaaaaagtcatattaaatctgactggcataggttcaatacgaagcgaaaaattacaaaattgcctccggtttctcaagacgaatttgaaagcataattgaagatttaccagaatcactgtctggcagtgaaagcgagacaaactcagaatccgaagaagataatttccaaatagagaaggcttttaaacaatccttgaacataggaaaagttgactccgctgacgaaaacaacaatcagcgaacaaactcaccattaacgtggtttcaattgagtaatgcttctgccgaagtgccaacctatattggtgtatataaacacatgttttccggtaataaccatatcactaaagatttacttgttcaacaacaaaatcataaccgacaaaagccacttcaactagctatgtttatggttggaggcggtcattttgctgctatgattgcttctaatgagtttaatcctcgtgatccccatgtacccaaagtactagcacagaaaactattcacagatatacaactagaaggaagcaaggtggttctcaaggggctgctgacaatactaaagggaacattcactcggcaggtagtggtttgcgacgttataacgaacaagctcttattaaagatattcagcaagtttttaaagactggggaaaattattagaaacatgcgatttaatctttgtacgtgcaatcggttcatctaatcgttcaattttcttctctcaaccaggtgctcttatttctccaaaagatccaaaactccgcgtatttccatttactactaaacgagccacacattcagaattacttcgttgttacaaagagttggttactccgaaaattagtcacgttgattcaatttcgataaaagctcaagaagaagaacgaaagagacaagccgaaattgaaaaggaaattagacaaagcagattacaagaggaagagaggaaaaagaaaaagcttgctaaatataccgaagtaattatctccaatttgaaagcgtctaatattgaagcatttttggaatatttgcgctctaatgatttgtctataaattttcaattttatcctaaaaatgttcatttgcacacatctacaccgttgcattacgcagttacccaaaaaaatgctaaattagtcgctaaacttctccgtaatggtgctgatccagcaatgctaaatgggaacggaaagacaccttttgagattagtactggaaacaaagaggttaaagatgagtttctaattgcaaggcatgagttgggagagtcatttttcgactgggaagcagctaaagttggggctcctcagtctagagaacaaattcagaaacaacgccaaaaggcaaagaccaaattagaaaatcaaagaagggataaagagaggcaagaagaacttagacggaaggaagcgatgcagaaaattgaagaacaatcgaaaagggattatgataaactgcacggcgaaggtcattcattaggaattaataatgttcgaaaagttgacgaattgcaatcattaagtccagaaatgagaatgcgaattgaacgtgaaaaaagggctgcagctgccatgaaaagaatgcaaacaaaatgagaagcatagttattttaaattaaaaaatactttactagaaaaagacaacaaaaggaatattgtaaaaatattaatcttagtatacgttattcacaattctattatgcataataataagatattccaaatattattgttattactctaaaaccccgtatttatttatttgtgagcagccaaaacctttttgttcttctttttgctagattttttcgaagcaactggactagccgccttgggatgagatacatccgattccaaagtaatccccaattctttgagcttgcgctttttgagtttaagcttccgattatggcgagtaattaacttatccgctttctccttgcttaatggtttttcatgctgaagacgcgctattgtggcatgagggatgcgtttaaaaggaacgtcggcgcctttaaacatgttttcatgaacctggtcttcaggaataaccttacattgtaaaagctttccatataaaagataattatgcattgtctcagcaacgacattggcaacgtctaacgattcaaactcgatgaaagcataatgcttactacttcctgtctaatgcaaaaagttagcagtcgaaaataaaaagaagaactaaaatagtccgctgtagataataaatgttaccatacctttctattgcgagacatgcgaagacgtagcacaggaccaaattgagaaaaatacatacgcatctgtttctcataaaatccatgaggaagtcggccaacatacaaaacaccttttttcttttgaagattcttattttcagaaacctttttctttatggttttctcagcatcttcgcccaaatccataatttgccttgaggtattaactagcgcatttggagagtcttcttcatcatcatctgaagaaccgaaaccaggaaaaaactctttatcttgtccttcttcatcagagttatctacatgaccttgtaatgatatatgctcggctttttcagcatctttgactttcttctcacgaagaaccgatttcggttgattcaccgattctaaaatcaattgagttaaaaaccatacaatagtgatattattcctatcacttacttttcgaagactttatagggctctttgccttcgacataatgttttataaaagtataggtattgaactgaatttttccagtgtcaaaaacggccagatgcctaaattacaagttgttatacatttccttaagctagacatggtagaatttgaatttgcgttaaatattcaaaaaattttttaatctacgctaaatttttacaaattggtgttaaaattcgttattcatttaaaatgggaaaaagtagaaaatgacttacttcaaatattagaattatcgatagtattattcaattacaaggaatacaaatcttttgaaggcttccgttttggttcgcaagcacaagaaacttgattaatagaggcagtcctctaattatatcactggcaaggtaaaataacagcaaaaatgaaatatattaacaaagtttttctttattcaaaacctaattccaacttttaaggtatcgaaaaatccgtggcaaattttgagagagaagagttataacaagaacaggaaattcgttgtttacataagtcccttcttcaccgcaacttcagcattcaaaataccagcaccagcagcacccaaaactgtgttatggacgagggagacaaatttaatatcaaagatggaatcagatctgatacgaccaactgatactgcataaccattttcattgttacgatcgagtctaggttgagggcggtcaggagtagaatcatcgaaaacataaatggcttgtttaggggcactgtagcagcctaacttttgaggttcagaaacatagtttgccaatacttcgcgaacttgatcaggagtaggagaggtcttggcaaacttcacagaaatacacatcaaatggccatcaataacaggaacacgattgcactgagcagaaacaacgttatcagtcaactcatatccagaaattgtgctattgacagagcccaagattttacgtgtctcccattcaattttttcttcttcaccgccaataaatggaacgatgttatccaaaatgtcaagactggaaacaccagggtatccagcaccagaaatagcttgcatactaactacatttgtttgagcgataggaccaaaagcatcttgtagagctttcaaaggtactacaacagcagcagtagaacagttagagttagtgataatgcatccacgatccagtttgttttcttgacgctggtacttgataacgtccaaatgatctgtgttgacggtggggacaacaagtggcacggtaggctcacgacgatagtttttagcattcgaaacgatgactaaattagcatcacgaaaacttttttcaatttcgccagcaaagtcagcatctaagccgctaaacacaatatcgcattccgaaaactccttgggatcacaagcctttacactcatttgggaaatctctttaggcattgcaatagattgtttccatttagtagcaactgcatatggttttcccgcagaacgagcagaagcgccaagaacagcgatcttaaactcaggatgatcggaaaggagggtaatgaaacgctgtccaacggtgcctatttatggttagtcatgtgtatccaaaaacactagtcagtgacacggaactgaaaatttaatgttcatcaaaaacttatagtactaaagacatggaattaaaatgataaaatgtgagtctttccaggcaatttaattcaaaaagtgtacaattaaaatgtagaccaattaaacaaggaacctaaaaagtaaacacaaattattttgtaacagtcaatcctttaactttatgcattttttaatgtacatagagcaatcgtttgcagttttgacagaacattaccattctaaatttaaacatacctgttgcaccgaggattccaactttttttatagccattgtttttaatcaagaaaacgaaggttacgtgttcttggtaaattccttcattgacaagcaatttaaaaaaaaatatcttatatcgtatcgcatcagatcttttctaatcgagatagtgaagtctaaagtatttccgcgtaccgtaaaatagtgaattctttaaacaaattgccaaaacaagcagcatccgttttgtaccaaagtaaggcagatgaagtaaacaattagttgtaaaatacaagttctaaaataagctttcttttatctaatctataagagtaatgtaaaggaacagttaatctgggacttgatcagatgtagtcattttacgtccattataacttggaagtaaatttagtagtgtcaagcaaatatagaaaggatggatgtagtctcattgattcttttgcaatttagatttagtactgagaatgatgaaagacaatttaataaacaatggataatacttttatatgaccggtcttttctgttttgataatgaaaaattagctcgtaagtatacttggctattattattgcaacaatttttttacgagtagctatgagatgtatttgagattagttaaaggactttaagtattccggtcattggttgatacatcaagacattaatgatcaatccgattctctgtctccagacacgcattgaatcaatctatttcaccgcacattctgttcctgactgagtaaattaactgacttctttgatcatcgcttaaaatttacagcacacttaaaaggattcattcattttgtgaaagataaatatcattattataattttactcattaaatcattaagcttcattcatcacatttgttcgtaaacactaaagtcccccttctcatatccatatgtcataataaaattaaaatgaggttcgtagaaacttctgagaaatatcttcgcatttgtcagaagaaaacagcgataccatactccaaatgaggaatacttttaatgcataaaaacacaataaaacagcattaatatcatcggagcaaacacccaataccgataagaataataaaaaaaatacaactaaagaaaaaaataacttgtactttcacgttctatctaagaaaactgagcttcatccacatctgtttgatcatccatcgaatcttcatcatctgtataattcttatcagaagatatttgatgagaaacgaagacatcactatgtggcttaacaaaatccaaaggcttaagttctctagcggcccgcaaattttcctataatgaaattagtatgcgacgatttgaatcaaataaaaataaataaaagtaaacacaaaccagcgaacttaccctattatagatttcttcgtgctccacacgaaggatgttccacatacaacgccgcatgatctcagcaagggtcacaaaaaaactaatccctgaagagtgctgaatgtggttgggaaatatgcaatagaatataaaagagcttctaacgataaaatttaagatcatagctataatatacggccacaactgttttagaattcgatgctcacggaattgccaacgaccatcctttcgaaccaaaaggttccaatccatcaaaatatcccacgtataagaaaaaagtgaatttacgccagcaaaaatagtatacaaaacccgatatttcaagccgggatgaatcctccacagacttaaaaacatttgggcgaggatattaaaaatatattttagagcattcacaagatgtggaaagcttttcaacgaatctgaatatcttcggaaacattgaaaaacacgtaagatgccaggcaatgtggtaaagaaacctagcaagggagaatgtgatgagttacaaagctgtggttgtcgccaaagtcgcttataaaggcaaaagaacaaagatatattaccgcatgcataagttagactaaccatttgatcagcaaaaaagaaatcctgaaaatggacagtagaaagcccagataaaaacacacggataagctgaattatcaagtatcttcgcattctccaatagggaacaatgacgggggctattaaaaacgtgcccactactcccaaaaacagggccggaaaatatattgtgaagccaggaaagaaatttctcatacacaggaaaaagaacagcgaaaaaataaagaagactgctcctacgatctccaaatgctgacgccagtttaaagattttctttgattaaattcgaaaataagcatgtagttaacccgtgtcttctcccacacgtaacagtctaaatcaaacagtacgaacgcaaaaattactaaaaaaaaacctccccatatctgaagaaggtaggaggattgctcagtagcattataatagcaagcagcctctatagccaacggtaaacctgcaccaaacaagagtccaaatcgcatcgagtttgcagaaaagtgctaaataacccaagttagtaattagagtataacgtaaagtccagatgcaactgaattatacttacctctttttgacgaaatgacttaagatgctctaaagcaagcttcttgttatgattggtaaaaagacgagcatatatgtcttcaacatgcaattgccaatttgtagtgatgctgaaatctgtgaacgtatatctgctcatataatcaacccaaaagccctgaagatctgtatgtaatgttttatcatactttttgacaatctttcgaaaggcttgttgattaagatgctggtactgagaaaccaatttgagataatcataaaagtccagcaatgtctagttgaaacaattagcaaatttacaaacatctatactatgaaggaaaaaagcactgaggcataccgttttcaatttagatttcagtttgcgataactgaccatcggagtataagcatcagttgggacactcttcctagctgggatatgataagcaggttgaagtcgagaaaaattgaggattgaatcaagcctttgtctgagtttagagtgctgtttctgtattaatacaacagatcccgattcaagggtcccctttttgaatgcacgaagcttttcatatatatcgacctgatcgctaataagatccattctttctcgcgcatcagacaccaaattttcaaaaaattcttccaccttgtttgcttgttggtcaagaaactcttgaaaaaggggatgaaaccgatgaatttgccctaggtcaaaagcagttagaaatgcattttttagagatgtcaaaaaacgtacctcgtctgttttattagtcaatagtgcaaattaaataaaacttactttacaatggcttcttcaggtgtttctcccaaaatccctgaagtaccatacagaccctcagaaggattctttgcaatgcctgcgattatttttttcccctttttgtagtcaaaataagcagaagcccattctactcgaattagcatatccgaacgtcaattatttttcaactacaaactagcatacctgcaacagattgtccttcgataaccctgtacagttagtaagcttcagaactttcaaaaaatccttactttccgaatttcatgttcaaataatttttaaaattaattacataaaagaaagaatatatgtatatatatatatattgacttaggaaactcttttttgcaaaaattaaaaggcaatatccttcaaacgactttaaagcattcaaaattcttgatatcgaaatatatatcaaaattaagaaatttaaagcatgtataaaatttaggaatgttttctggttactttgctttagatagaatgttggttctagttgcccttattaagataagtacaccaagtggtatctgcaaaaaaggtaaatttagtggttccaagggatttatattttcatttaacaatgtttaagtatcgtgaattctcggtttaattcttgtgatctcgtggttaatattaagaggcaattgttaatggatgccacaaaaaaagttaagtagggccattattggggaaaatgcgctttaacatatgtattgtaattatttcacttttttttgtttatttttcctcaaactttagaaaaatcacgattaactgatcgatgcgatctaattatgctaattatgatataagcgatagcgagttggaggtctgtcttactttacttcaattcataagattaattgtttaaaagtagataatctaatggtagtatcttctgttccaatcctcacaatggatgatagctgtgtttattggagttagtcgtcaatgcatttgaaggacaggaattttgctaatgtaatgaactactagatttttaagttaacatttgacggagttcgtctatttaaattttcctttagctatcatagtggtccgtaatgcagccttttataagtctttctgcagtccctgaagcaacaaattactccatcatgtattcactattagaagagagaactaagaaacttaaatgaaaacataactataatttttaacttaaataatgcttgtctagtcttgtcttccatagtatttattttttgaactcagcttcatctgtcaataatgcaatcgaactcgcttggatgcatttctttttctatcatatgaaggctatcgaatgtatcaatttatacaaaggaataattcagtaaaggccaataattgaatatcacctgtttcacttatatattatatatcctaacccacgttccgctcctaaaccaccaaatttacattgagtaaatctggttgcagcagactttcttttgcaatgaatgaaacaaacaacacttcattgcttccagtatcttctttaccttcaggtcttctgcctgttggttttagttgtacggtggaaaagttttcggttacagtaaaacgataccttgctgaaggtatgtaaaatcatcagcttccaaatgttaacagcgtatctttaggcggcttctctcatgtatatttggtacaattggtcttcccaggaaagccaccgtttgaggcagttttgaaacgtatctttgcaacggatgctatggcccttcgagctgtgcacgaagaagtacggactatggtatgtccttctatcctgtattttgttgctctccaattttttactataaactaacgacttgtctttagaaacttgttagcaaccaaaaacggtgtgtctcatattatggctcggaattttttaggacatcaaaaaatcaattcgaggtccttgtactattggagtattgcccttgtggaggcttgattgactttctgaacactagacttcaagttcgtttatcagaacaagaaattttgaaaatagcttctgatgttactgaagcggttgcagtaatgcattacttgaagcctccgttaattcatagagatctcaagattgaaaacgtgttactagctgccccaaattcgtacaagctgtgtgattttggtagtgcatgtcacccaataccgggtgctaaaacggccgctgaggccaaacagctagaatatgatatcgaaaaatttactacttggcaatatagatgccctgaaatgattaatgtccataaaggatttgggatagacgagaaaagtggtatggtttctttgtaacgttattagaatatatttcgttaacactagcttttagatatctgggcgctaggggttttgttctataaactatgctattacacaactccgtttgaacatcaagggcttgctgctattatgaatgttagttacgcttttccaacctttccaccttattcagatcggttaaagcgactaatttcaaccttattgcagcaatatccttggcaacgtcctaatatctaccaaaccttttgtgagatttgtaagatgcgtaatgttcctatacatatctacgacatatacaacggtaaaaatgtatccagctgcaatccttctggttccgaatatctgcaacatgcttccaagttagaaaacagtggaattcaccagagtaaatcatccgtgttccctcagcctgcttctgctatgaagccaatggcttctccgatgttacccaatgtaaactcgatgccttatctttctaacggagatcataataataatggaaacacttcttctcctgtctcaaggttttcgtacggtcaacatacttcaaatgtaccttctactcaaaaattacctagcaacttccgagttacccaaggtgcaccacctagtcatacttatggaccacctccacccgtccagccaaaacctaaaatatctcctacgactcctcgtttaagcacattagctctggctgacgatatgttttcatctacggctaaagaaactgttcctacaaacgaagctgtctttactggtgatgttaaatcttttgatagtcaagaatcaaatattatagaaagtgaacctctttcagctagtaatgcttcgggaaagccaaggactagtgttaaccgtttggttgataggtacaaccatacatcaagtttaaacaaggtagctgctgctcccgctcctgtcccaaaacctgtaaacttaaaatctgtggaaaacccacaaaacaatatatctgcgcctacaccctctagtcttcaaagttccaatgctccagttgggctaggcgaggtagaaagcaaaagtgtacctccaaccaatatggccacagaacgaggtgtggtgggaagacgtgccagtatgtctattgctgtgaatgcacgacgtgtctctaaacccgaaaaagagcatacgaatccaaacgctgagcagggcgatgtaattcccgaaaaacctatgagtataaaagaaagaatgaatatgcttatgaccaagactgattacgaaaaaccgaaggttgaaggctatggccgttacaccgacgttcagcaaacgaaaaagtaatatttttatcatgatcttcaaatgaccttacggataagtcaaataatgtggacattaagtatctatattttacaaaattttattacaatttctttgtatatttctttttgcgcttgtttttttaccaactaagttaccgttttgttttggaatgtttaccatcgagtatgatgttgacgagtaaacaacctcattggcaaatatcagtttaagatttctccaacaactatttccaataaataaaaatatacattcattttgataacaacctaatatcgtgctaatgacagaagaactttttagtaacagtgaaacttgcagtttgtcggatccattgacatctaaaacattgtcaagtatagaaaatccttttgatgatccctatatattaagtgaagagtcagaaatattaaccatcaaaactgatgtgttacgaccgaatattctgaataggaaatcgtctttttatcctgaagctgatgcaccagttcgaaaatctaatttacaagtaaaaaaaatctttgaaaaccaagttttaaattgtgatggtataaaagtagcaataacgattcctgatacttccttaatagctggatccttgttacatggcaacatttggttatcctacgaaggggcaaaaaacgtggaaaccggtgtttggataaaggaaatgtttctcgatttctatggtattttgaattttaaaggccattcagaacctttctattctatctctgaaaagtactcgttttgcaaccttaagacatctgcactgattctctcaaaggcagcttctgccagcataggcaacaagggccttttccttaaatgttcttgtaaagttgggtttcctttctccttcatcgttcctttggatataggtccaggtacttatcattcatcgaaattagaactgttatactatatttcaaggtaaaagattaaaccgaaaaaagtaactgacatcttagtacgctgactttaacatctctggatcaaaatattcgctgtactcgttgtacaattcctaaacgggtaatcacttcaatgcataataatatagcggagctatataacccgatctcatgcattaaaagcctaccctatctttcattagaagaagcaaaaactaccttggaggttcatacggacagatccttgttttttagtggtcaaatcatcgattttaccatttgctacactcataatcatcacagaagggtaaagtctagtaaattaattaaactaaagataacagttaatcgctaactctcaaaagattcataatataaaagcacgattgctggaaactcatatctttcaccctaatactcaaaatcattacggtggttattgtatgaaccaggccgaagaaacattcgcgagttgcggatacttgaagcgttatcaaaaaactaagacgaaaacaagggcaaaatcaacttggaaaattgctaataaatctgtttattccaatttggcaccgactctaaaaaacacaatccacgcacaaatcaaaatacctgaattttgccgttctgttaatttaaaagatcagctgaaaattgattatacccttgaagtttgtttctcagcattttttaaaccaaggtatgtaatccaatcattgtttaagttcacacgctaacaagatagaattttatcaatacaaattcctataacgattttacattcctggaactaacatcagctacctataacatgcagagtacgcttctatatatctactgccaattcacttagtgaaactagattgtaaatgaacgaagactgcattgtagaaaaaatagagatcatgattaaattacttaaagtagagagcaatcaaaatatcaccaggtgaaaaaatttcgaaagaaggaaaatgtaaaagaaaagcatctggatttgttaaagttatgcagaacaagtaggcatgaaaaatgtagacttcagacgaactagtgaatgtcgagaagaagcaaaagagaaaaggacaagatgcgaaatattaggacaaaaacaaagaatggtaataataagtatgcggaagattaaagcagaaacttccaacaaactggacgaagaattgaactaagctgattcaatatttaaaagcaggggtacagacgtattagatgttgagaaattggtaaacaaataaaaaggggaatagagaaagatgatactcaaagatgctattatagtaaataaagtttcaagcctgaaaagcctacgactttttgtggaataatcgtctaaaaaatcccattttcttgggtttggaacgctctttcgcagtaagcggaagagacatttgagattcagcgtgttggggataaggtcgtgtattaagtccacctgttttcctacgagaaggtggcggtggagcagctgtaggagatgtacgattacgaaggccagtgttactgtcatcagtatcagattcgttctcgttagaaatggggtcaagttgagaaggggaattaagtggagatcttcgggttcccatggaagagtgagaccgataattagatggcctattcaaagtatttggtgtacgagacatcatactagcgctacgatttaatccaagttttcgaatgagagaattttttcttcccaagcccgctttttccattgccaacatttcttcattacgtgcaattgcattttttgaagccatcgcaccttctatacgggtagagtcagttaaacctggagtatcattattgccagatgaaggaaattcttcttcgatgccaacagatttataaggagattgcaatatgttttttgtacgcaaactctcatgaatggcttttctgctaaaatccttagggactgaagggtcattataagtttccccaactttcggaatggaattagcaatactatcttttggaaatgcggcaacaggtgctttcttagaatttcgattacgatgaggtcgacaagcatcaaaaggaccatcgtgatgaaagctaccagatccataaagccctgttacgtccaaacgatctatctgatctaatggttcttttgacgaccgaccaggacgatgtgatccctctcgtacagacttgtagcgtcgaatgctacccctgcttttcaaactggattgggtggatggtgaactgtcgttatgcgatggagaacgatggcgactagagctggcaacatgagtactacgagctctagcaattttcgaatatcttggaggggggtcaaaagtgcccatcgaactgttagatcgttcggctaatgcctccgcagattttttaacgggacttgctgaagcagaggaagcaggagatggctccttcttcttttgaatactattaaactggtaaaatgttagtttttgaaacatattaaaattgaaagctgtgctcgattttcggctcaacttcattgcaaaccgaagaaactccttgtctaaataaaatgtacgttatgagcgctttaaattagaaacttaaaaactcttaatagaacactaatttggaaaggtttcaataaatttaacaaatcttcacgtaacgaagcaatgaccgaattatatctacttcagcctcaaaaatttacataccaagtcatctgccatagattccatgaccggatcagccacacgctctgtcttgggagctaaaaaaggattgttactgttgtgcagggaagacgtgtacacgccatcctcttgaggtgtctgactgcttgtagcagtacttaaaaaagggttctctattaccatcatcccgtattgcacccaaacgatacccttgcgatttcgttttgagaaagagcaccttgaaatacacaagaggtttttccgaatcaaacttcgaactacaagatatgggttcttggtgagttgggattccagtggtaaaaatatctacccctgcttataggcaatttactgtacagtgctattgcacattgggttgcgttatctaggtttcttgctataataattttattgtgcaagacagaaaagtacatttattaagaatgggaaaactgaataaatcgaatatcctaaccactgacgattagacacattaattcgattaataacagtgatggttatgttaatgaaaatacgagatgaggaaacttattaatcaaagcaatcatctggctaaaaattaaacgaacatctgtgaatgttaaaaatcttaagtaaacaacaaatcggttaacataattttcaacgaaaaaaatgttttaaacccatttctttaattcgttaatttaatcaggattccattttatcataaacaagcaaatgaaccgacacaaaatgaaacggaagttccacagaggcacaaaaactaagttttaccaaaattactctgcagccttttgacgtgttcaaatagaaatggcatttcctacttgcattacaaaacaattcataaaatgtcataaaggagcccttattgggcagatgaaatgagccacaaaaagtgtcaaagatagaaatagtcactagaaaaaataacgcattgtaaaaaaaatctaagaggtaattattcataatggagacccctatcgcttctaaaataagatataaagagctgcaataagagcgataccaattatgatagaaaaccaaaacgcaatatttcccagcagtctatgtcttcgaacaaacttctgtcgctgaataatgatatacgggatttgagtcatttgaaaaaacaaaccgtaaccgcggatttttaaagtgatacatcccataacaagttcatgtaatacagaggagacaaagaacgtgaaaaaagtcgataaagactttgacatgaaagagttgaggggaacataaacgtggcgaaggagaaagtaatgaacgggcttattccaggttcgggcaaattgatcccaagtccagcaattccaccaatcatcataaaagtttctatcggcaaatctagtaatctctgcgctgaaattacaaactccttcaaaaatgacccagaacacgaggaggaagctaagcataaatgggaacatcaaaaatgctacagtatggcctaaacgtatagcaaaataagtagcagatgcgtcttcaggagcttcaataatggttcgaatggctttagcaagtacaggaaccatgaaatgatcagaaataatgaccaaaagaaagatacaaccaaacgttcccaaagcgcattcaatcaaataatgaattcgcacatgggcggttcttgggtagtataattgataacataagctgggcatgaaaaggaaatccaaagcatttggtatggttaaattttccggataagtattaccatgatggttgagacaatgttcataaaactcaactgaggatcgttcatcatcatcaagatcggttttttttgactgaagcttatttaacgaatgataacaataagaataccaaccgttgacaacgttataggaatgaagcttcataaggattaccatagaatgaagaataaacatagcacgatgcgtccaggaccagttgctaagacagcagcgtaaaacacaatggcttaaaaaaagtaaaataagaatggaatagaggtaaacgcctaaaccataccaccgcagatatcccaaagcaaaaatcttttggaaaggaaaagcaagtagaaacattgaagacatagcaaggtctgcctttgccagatctaacaaattagactgaaagtatttaaaaatagtgccaacaactggtcttccagtcaattcgaaattttctaaaaagctcatgaaaatcataatagagacagcaacccaaaataacacaaaaaatccagtaaagtctaccgcattacgttgataattacgagcaaaaatcgagggagtaggagataattccagaggtcggtaagcggccctagaccttcgaaggtcaatttttgaggtttcagaaacacctttgaacgtctgttccaagttgacatccgatggtttggatttagcgggtgttgcagcaatcatctttaaataaccagcaattaaagcaactaagtgaatatataacaaaaaagataaatatataaagaaaaagataaaacaaaaaaataacgtaaaatcagcagctacgtatcgcgaacagtatcaaagaaattgaaaaagaagcggatatgaacgtaggaagattaaatttattttttgcttcgcttctaaataaaaaattgaggaatgaaagcaagaaacttagaaatgtaatctattgatggaagttccaacttggaatttcaagatgacagaactggtatgacgaaaactccacagtcgtgattccaaaaataaaaattctatgccaaatgttccactatagaatggaagtaaataaaaagctcgaactcctaagcaattcacgttctatgcgatttatgtaaggaaaagccaagtctccagtttcaaaatgagcaaaggagttgataagttagaattgcgagctaagacgatgaaccacctgatctcagcaatatctgcaatactacaccacgttatgtaaaatttcgttacgtatcactatatatcacatgtcctattcatttatccgctatatgtgatacgacattggcacttgcttattgtagcttattaccaaatgactgacaggtacaaacaaaaaagaatgctcaatcgaacctttttcccttagtttacatattatgagcatttcaataataatttacaataacaccttaatacccgattttcgcgttacctgcatatcgcaatatagtagtgcacaaatacaactcactgtgatttaacgtgccattaaaactggttacaaactgcatagttaagaagcaaagccacatagcgtggtcaagaacgaatagagaaacataaattccagatattgcccatcaattaacaactccatatagcaaattcgataggataattcaaaaattacacagataaccaaaggaagctaggtattcttttaatttgtgcagtattggtgaatgcatcagttttgagcgtcgtttaaagctgcatcctattttgttaagtgaaattgatttgattttcattgttttatatattctgtgtttagattgcgtttttctgtttgctttcaatacatctcatagaaatgcaagttaatatttactggaatcaattatagtaggaacgtaaaatatctcagtgaatattggtacggatggaaagataactttagtattgcacatggattttattaagaacctctaataagggaatgtgtattaaacgtaatatgattactgaaaagcacaaaaaccatacctaaaaaatattcaactcttagccatagtacaccttcttaaatgtacttgcaataagtggtaacataatattaagttaatcaatataaatggtatttacatctgcttaataaaaactaggaattataaaaaaagacacttcagctgacttaacgtaacacagcagcaacaaaacaaattaaaatttattttatttaaagcatattttttagtattcattattgatagattgacgaaagagtcgcaacgttaaattcgttttaaagaaatttaccgtgcaataccctaccgcatgtacaagcaacagccaagtaatgcaaacaacacatccaaagaacctgcatcttacttgttcgggagtggaaagaggtttcaccaattccccaaagacgcatccaaagatgtcaagtttaaaatcttttataaaggctgttcgggcatccaaaacgactgctgaggagcacacaacgattctcaaagagtcggctcaaatcagaaaaaacattcgtcaaggttctaatgacatgcgtatgcgcagaaaaaatgttgccaagctgctatatttatttctactcggtgagccgacacactttggtcagattgaatgtttaaaattgttgtcgagttcgcgattcatggataaacgtttgggatacctagcagctatgcttctgttagacgagaaccaggaagttttgacgttattgacaaattctcttcaaaatgacttgaaatctagagacaaatttattgtggggttggcattatctgcgtttggtaatgtcgctggccctgagcttgcaagggatttgtcaaacgacatagccgaactttgctctaaccatcataattatatatcaaagaaggctgttctctgtgcacttagagtaattcaaaaagaaccggatttggaaagtttatatattgagaaaaccgatgaattgttacattcaaaaagtcatggtgttttaatggctgctcttgcttttgccatcagtgcttgcaaaataaatccgtcgctaatatcccgatttgaaagtcaagctgacgatttgatttatcgtattcgtcaattgtccactagtacttactcctctgagcataacattggcaatatatctgatccgtttttgcaagttaaaatccttcagtttttgtcaatacttggtcaaaataaccctaaaatttacgacaaaatgagtgatcttttagctcaagtctgtactaacactgattcctctagaaatgcaggtaatgctattctttatcaagctgtgcgtaccatccttgatcttaattctgacagtagccttcgagttttgggggtcaatattttagcaaagtttttaggtaatcgtgacaataacactcgttatgttgctcttaatatgctgaaactcgttgtaaatagtgaagaaaatgcagttcagcgtcaccgatcaactatccttgcttgtcttaatgatgtcgacagttctattcaatctcgtgcgcttgaactttctacatttctcgttaatgaggcgaacgttcgtttcatggtgcgtgagcttttatcatttcttgataacgtttctgatgaattacgtggatccactgctcaatatattacagaagtcacaaatgcttttgctcccaataagcgatggcatttcgatacccttctacgagtcttcaaatctgctggcaactttgtcagtgaatcgactctttcaacgtttttacgactcatagctagtgctcctgaacttcatgaatatgctgtggtaaagttgtacgctgctttaaaggaagatgtatctcaggaagctttaactctttctgctttttgggtaattggagaatatggtcagatgcttctttcaccaacaatgaattttgatgatgatcaaacccttcctcattctgtttcagaatctgatattgtggacattattgaggaagtatttaatagcgttgaagcatctaggtacataattgttcaatatggtcttttcgctctcacgaagttaagtgctcgtctaggttcttcttctactgcttctcgtattgacaagataatttattcctataagagaaacaagaacaccgaggtgcaacaaagatctgtcgagttccaccttatattaaatgactccaaattgagcaagacaattctagaaccaactcccgctcctctgcctcctcctaggaccacgccttatcaaaatgcggagcaaaagctaaaggctaacaaacacgtagaaaaacgtgttcaggaaagcaacgaattgctagacctcattgggttaactaccccttctgttgctgagcccttagaaacaccagtggatgaaatgactcaaagccctcaatccagcttaagccgcgctccttctacttccaaaaagagtcattttgaagatatccttggtttatttgcttctccggcgccttcagctcaaccggttgacagcttggcaagcagctttgcttctttggactttaatgcttcagccagccaaccatcaaacaacttgtctttgctttcttccataccatcaacttccaaatcataccctcctattgttgtatttgataaacacgatgtgacgttaactttggtgccatccaaagaagaaagtaccaaaacagccgtcattgaagctaaatttaaaaataaaaatccaatgactagggttgagaaaatacatctagaagtggcagttcccaaatcacagaaactgaaaattcagcccttgaggactacaagtatggagcctggtggagaaacttctcaaaccctgcgggttcatgggccatcgggttctcaagtcaaactgcgtctacgtatctctgtggtccgacaaggtggatcaaatactctcgatcaggtagattttggaaagttgccatctgaccttttacaatagtatccgaagtatggacaatgccatttaaaatataacgctcgagctatcaaagaagatttctgacatgatccatgctacactttttgatgggtctagtcagttttacgagaaaatgttcgtagaatagtgaataatgaggtaatagaaaatgaaagctctaattgtttttatgaaagaaaataggtttttttttatataattttagcaattttctcgatatggaatcatggtatacttattggataagttcacttatgtaattttcaaattgagacttgctcattctttattgtatatcattgaacggaaatttgaccttccaaacccttcattaagaagtggtcggatttagaattaaagctgtaatattattttaatagaagtgcatacctccaatacaatcgcaactagaaaagtataaaatgtaaaatcctaaacttatttcctttaacaattgatcaatgcaataattaagcctatgaattatatattaactaacagagagtaaatccaacattagaaagcattagtcttgctttaagctttttcagtactatgcgcacgttcagaaattaactgttgtatataaaatgctattgcattttgattttgtgtttccagagaccgcattcgctcttttaaatctctttctaaatcccatgtaggctttttaggtcgcaaagttaccaaatctagttcttcaacaggaacagaactttgttcttcaatttttctcttagtcttttcttcaatctccttcgataatgcttcaactgattcaatcatgtttggcggttccacgaatcccattttaggtgcctgcacttctggatcataatttcgatgctcaattacatttttttgaacctcttgagaatcgcgagttttattctctaactgctttattttcctcaattccgctaatctctgttttctggactctgctacctcatctaatgaagacattttttgttccaatacaaaaacacaaaattcggaaaaaccacactataaaaccagaatgaatgtagtaagatactttttttgtagtaagtaataagattaatatcgagagatgttaaaattcctagaattaactagagtttgacaatgcacaataattccagttcctaatcagcagtatcaaaaaacaaaaacaaaaattgagtgtgtaattttatattaacctaatagcgacgaactaccagatcgttttactttctagttatttttgataaatgcagaatatgtatatgaatattgagaagttaggaaaatgcaaaccaagctcgttgttgtcatctacgcagtttggtatctgttttacggatacgtaaaactgcagtgagttttccttgtgacatattatattgcaatatgcaggtaatataaacagtaacgtacaatagtattataccatatatgctgtattgttacctatcactaatatagcttataactaaacttcgttcctcagttcagctaaagctctatttttttgtttctaaatagttgctattcacgggaatccatgcatgtagaaggatacttacccctaattatcaataaacgaatcttaaaagatatgtcagcatatgacatataatgaggcgtaatgtagtacattatggcgtagtgtaatcgttgataattttttatttttaacgtgttgtcgctgaaaatcgatagtaaaacttaaggcagcagagcttgtcattcaataagtctggttcgcatcgtataccggtgcagcacacatgcaaaaaattaacttgctatttgcctatatcaatcaatgcctcaaaacgagtatattgaggaatctattcgcaagcatggtcgtcgtttcgatcatgaagaaagaaagtgagtaaatttttttggatttattgtcaattgagagttttattaacacttctatttcaggagaaaaaaagctgcccgtgaagctcacgatgctagtctttatgctcagaagactcgtggtataaaggcgaaattgtaccaggagaagagacgcaaagagaagatccaaatgaagaaaacgtatgtcatgagttattgctaataaaaatttcagtgaagtggtgaagttgagatgtctgatttgattgtttaaacgtcatgtcgtacattgatttaaaaaagtttttaaagtctgttactaactctatcagtatcaaacaacacgaagaacgaaatgctactcaacgtggatccgatgctcaaactcaaggtgctgttccaacctatttgcttgatcgtgaacaagaatcgcaggctaagatgctttcttctgctgttaagcaaaagagaaaagaaaaggcagctaaatattctgttcctttacctcaagttcgtggtgttgctgaagaagaaatgttcaaggttattcgtacaggcaaaagcaagaagaattcgtggaagcgtatgattactaaagctacctttgttggtgatggatttactcgccgccctgttaaatatgagcgttttattcgcccaatggctctccgtcaaaagaaagccaatgttacacataaagaattgggtgttactatgcaacttcctataattggggttaagaaaaatcctcaaagcccgacttatacccaactcggtgttttgacaaaaggaaccgttattgaggttaatgtcagtgaattaggtcttgtcacatctggtggtaaagttgtttggggtaaatatgctcaaatcaccaacaacccagagttagatggatgcgttaatgcacttttactgacttagtttatttaaggaaaaatttatttagcgtattatagttttcttgggcttggatgtatattttccttctttgtttggcttgatgccaccttgaggtatttgaaagtcgaatatgtcgtaaaatcaacaatcattgttggtggttcaagcggctttctttacgattggaaattatcggaatttttacacaagttttgaaatggttatggcatgggtattaataaacattgatttttaaataataattgattaaattcacaactgaaccacagtttaagcgagtaaaggtatcgtaaatgtctaggtaattattttttttaccaatacaggttgttggaaccgagtattcaatgctatcgatttcactacaagtacaaactgctacaatacaatcgcggcttaagactatttgctaatatttgcgacgtaaattaaggcacaaagatactcattcgtataattgatctagtcaaacaagccaaaacccatgtcctcatcagactcttcctcctccttggcttcttccttcttttcttcttcggcagcttcagcaggagcggcggcgccagcaccggcagcagtaggagcagaggcggcaccagcagaaccaatgttaagtaggagctccttcaagtcttttccttcaagagctttagcgaaaatagtggcccaaataggctcgacttcgacgttaccagccttggttaaagacaacagcttatcggactagaagttttgttagctaatttgaaagaagacatgttttgaagatgatcggatgcgtttaaataaagtatctttcaatttcattaagaaaatattaaggcattgtaatcgctcagcgactcaaacagttaacgaatccatatttttttacttacagtaatttcgatgccctcatcggccaaaataagagcggcgtaactagttgcaagttcagaagcagacatcttaacgcctttttttgtgatgagtatgtagatggttagctgtcgcttaagaatccgccttcaagaccatggtgtcgaaactttctgtgactgtgaaaatactattttaaaaaagctttgttaaatatcgttattctataagtttgtaaataaaataaacaaaaaattggagagtaaatgactctctttaatgtatagtgcttttgttaatgaccaaatattacaatttagttttttagaatttctctagtaatgggttatctttttactgctgtagtgacgctcacgtcgtagtcagtataacttttatcaattttgcaacctagaatagattttttttttaatattttctttcacaataattgccgaggtttatcaccaagtagtaggtcctttttgttttgatccccttacgcagcttttcttgtttaactcaccataaaccaagatgagtacaacaactccaaatatttggattgccgcatcagatggtaaaacagacgtcgtattggtacgatttatttatattgtttttagtaaagagtaatggctaactattccttagaaacacctagattctggtatttcaccaaacgcagcagacgaaaatggatatacacctatacatgcagcagtttcttacggtatttatattatggcgaaatatttttaatgctaactgtcaggtcattctgatttgcttaaaattcttgtcgaacgtggaggagatataaatattcgtgatcaagatggcgaaacacctctctttgtttgcgaaaaactggaaatagctcatgatttgataaatcagtacaatgcggacaccactgttaaaaataatgacggtttaattgcagctcaagttatagaggcaaatggagagtttcctgaacttgctaaatatctatactcttttactgatttggagcccaaagacgtgaataccttgcccaatgatactaaaatagaatatgcaaagctcatgacagagcaagagatggatgaagaagctggacaacccttgcttgatcaaaaagccaaggccgaaattgatcgcatattagctttacgcgatactggtgttaatgttgatgatgaacttcgtaaaatactgactggggctttgtctggtcactttgaaaggaacgttcgtccacgctcaaattagatacttcttttcgcatattttcttgaccggtcgcgtattcatacatcccctttgctatttgtagcatactgcctgacactttcgatgattattaaagttggttcggacgcaacatctatttcatacaaatatttatttgaaaaatttcttatgaacatttcccaaggcatacttaatttcagcattatgttcccagtttctttttataacattttttaataggcttccaaatgcttgtgttacttgaatgggcgactggtcggaatcatccgacattgaagaaaaaaaaaagaataatgtaaatattatattaaaatctattaaatcctttatttattttgagaaacaaatttttcattaggccaagttttactcccttcttcttcgctaaatgcgaacgcagcaaatttgaccaccgccaatatcctctcatctcgcctttattcgaaagaacttcaaaatggctattggcaaaaggaaggaaagcacggaggtaaagaaaaaagatggctcaatgaataaacgagtgaaagttgctaaactgcctaaaaaagtggattcgttttcccccaaaaaaaaaaaaaatactacttcgtcaggatcttcagagtctgattcaatgtcacaaaatgataagaagaaggactcttcattaaatgaaagtgaagatgaggacttcgcaggttttggtgaatctgcaagtgaaaacgatgaacttgagtccgctgagtcagaggcagagaatgatgaagaatcttcatctcagaaaagtaattctaaagaatctcatgctcaacgtaaaaaattacagaaagaacgtaaagctatgaagccgtttgccgacactagcttgaaagccaagtccttatgggataaattacgtcaaaaaacttcaattaaagctgaagaacgaaagactattattgctgaactgtttgatttaattcgaacgaacgttaagcaacttgtatttaagcatgacatgtctcgtgttgttcaaacgtgtgtgaaattcggctcaaaacaacaaagagagactatttgtgctgaattagcgggtagttacgttgatctttgcaaaagtccgtatggtaaatacctagctattaaaatttttaagtatggtacaccgaaaatgaaagaagtcattttaggagaaatgtatggaaatgttgtgaaaatgattcgtcaccgtgaggctgcttatgtggtggaagatgctttccgcgaatttaccaatttgcagcagcaacgtgcgctgatttgcgaattttatggacctgaatttcaagtatttaaagaccgtactcaagacattcacattgataagcttttaattgatcaccctgagaaaaggccaagtataatgcaaaacttatggaagactattgagggttctattgctaaaggttccattggttttacaatggttcatcgtgccatgttggagtttataaaccatgctgattccaacgaggcgaaagaattattgaatttaaccaaggagttgatttacgaatttgttcatacaagagatggttctcaggttgcgatgaaattgtttgctctagctaatgcgaaggatcgtaaggttatgctaaagagtcttcgaccttatttgattgaaactgcaaaggattcttacggccatttggtagtggttgctgctttggattgtactgatgatacaattatgactggtaagcttttacaagccgaatttgaaggtgaattattaaaattatccgccgataaatttgctcgcaggattttgttgtatgttttagtaggctgggaagatgctcgctattttagtaaagagaatcgagaattacttagatcacttgattcattaaaagccaaaacgtctaaaaaagaccccattgttcgtcgaaacgagcttaaggcaacgataggacccttgttaatttcgttaatcagcaaagctgcaggtgacatgatagctgaatctttagcctctcaagttttggtggatgcattgttgtatgctccatgtgagaaggaagaagctgtcgatgcaacgttgaaagcttttgatggtaacccagagcaggataaccacttgattcatcaaattcattgttcgcgcgcgttgaagacattagtccaaaatggacattggagtggtgctgagaaacaagttgtaaaagcggaagatgacctgaaggtggcctctaagctaattgttatcattaaaaaatatcttgtagagtgggcttctggagacggtgcgtttgttgttgtagcagtcctagaggcactcagtgatagtgaaaagcaggagtttttgaaaatattacggaaacacaaaaatcagttaaataagtcagagttccgtggaacaaaaaagcttttagaaatgctttaatatataggctctatatttaggtatagtgtattttgggattttcggtacaattattcaaggttattatatgaaataaaaaaaaagtttattaatctgacgaagagtagtaaagataacaaataaatttcgcctgatgctaaagcatcagtgagagcgacgaaattaataaaagagaattttatgttgctgaagtgaggtcaagttaattcgtagaaccaaatcaaggtttcgagttactacgagaaacataaacgaatagtttaaattattaaatttatcttttgatcttttatcatcggacccttaagcaatccttaactagcagctaataatggatgtttagttaattagaaattcagctgttaaaaaacttatgtatcaaagtcacagtactaaatatttatattaacatttaatataactattgatctttatgaaaaaaaaatttttttttcaagtaagcttcttcataacaataatcttcacctgactaccaccggccacttcgtacaagatggtagcttcacttgtcgtgttaatttcgggatcaggttctaacctccaagcaataattgatgctacgctgaatggagttttaaagggagaagcagctgtaacgcacgttttgtcaaaccgcaaaaatgcttatggcttagaaagagccgcgaaagctgggataccaacgtctttgcatacattgttaccctacaaaaaggaatacggacctgagataggaagaaaaaagtatgatgctgagttggcggaaaagataattaagcttcaaccatccttggttgtctgtgctggatggatgcacattttgtccccagaagtgttgattcctttagaaacaaataaaatcggaattattaatcttcatccagctcttcctggcgcttttaacggtattcatgctatcgaacgcgcgttcgaagctgcccagcaaggaaagatcactcacaccggtgctatggtacattgggtgattgcagcagtcgatgaaggaaaacctattatcgtgcaagaggttcccattttgtcaaccgatagtattgaagcactagaagaaaaaattcacgcagcagaacatgtaatacttgtgcaggccattcaccagatcattactgacaataaataaatttcattttgggagtaggggatatgccctactaattcttaaattttgattattaacctgtctttacctttgctttacgaataaaaatgtgaagttataggaaaccgactgaaaccgttgtctgcaaacttcatttattaaaccctggttcattctgtaataaacttttgaaagggagaatgttaagagaaacgattaaacgtttctaagtgtcgtctagatattattaatgaaaaacgaaggtatactcgtttgaaagaattttttcaataaaattaaaaagcgtttgggatttacagcaaaatcaatgtttattactcgttactagttcattctatacctaaaaggcttgagattaactaccttgatacattttttttgacctagccaagcaaagtccgaagaggaatcattcattttcgcattctctgtttactctactttctgtgcacttcaaaacttgtgactcgagtgaatgtatatcatcatcatcatcaaaagttcaggttgggtgagttggagacaatgcaaaacgattgattctcatgtcagattgccccacttggctgctggttttgtgatattgaaattgataaaaactattaatttatgaaaccctctttatttcttgttccttacttaatttcctgagtgaaactgactatcttagaaataatatgcacgtcacacgaacgcctccctgtgaccttgaaagtcgaaaaattaccgttctaaactttgcttagttagcactaagattcacaaacttgaatgcgcagacagcaacttctctcctctggtaacatcatatttactccccaacggcggtttgcaatgatggcaagtgatgcttagaaaaggtggccttgaaaatgacgtcggtaatataacatgaagagtcaagttaatttaccaatttacggagcaaatatatattagtagtacgttccttaagagtaggagctgcgaagaattctaagattattcatttttagcatctttgcttataatcactaccacgtgtaacacttttaatctattttcttgtttgttagtttctttggatttcagggaaaacttaagaaacgttttattataaaagtaggtaatgcgggaattttagtgctcttgcgatatcttaaaaattcagtactaaccaatctctctagttgatcacagtaacgtgaaactaaaggaagttaactgagcaaacttgtgtgtttgttagacccaacattcgtaacatctgcattttaacaccaaggatgtcggatttccctccctcatatcaacagcatgagaatgatcggatggttcctcaagaatcatctactagtaacaacgcttccgagtttaacgtacccaaaaagtcaaatcggcgactctctgttgtccagcaagacgagagtgttttaaatcgtgaatttgacgatctcactcctgaggtgggttttgacgcagacaaatgggaacgaaagaccaaacatccgaatcctcagaaaccttttgatttcaaaaggaagcctgaaaaaaagtaccactcaaaatctgatgttggattttgagatttgccacactcttatgatttctgctgtatttagcaaagtgtataccgaagcgattcaatttagtgtaggtaaacagtactgacttctctcacaactgttggcaaattgtcaattatgtgttaatccatggtttctgtctttcaaggtactatgaaatgatcttttttttatgtatgtcacggttatttaatgagcataaacattccaaaatgatatgtgtattaaactggataaatttacttggctaatgcgaggtaaatagataaataaagtcggaaacagtaattgtaatacttttgtaaattggtcatgaaatacattgtgttttaacatgcgaatccgtattaataattaatatagcaatacagtctatggagaatggtaaactatgtaccaatttataatccaaaagtggcaactggagctacgaatgaaacattttatgaataggaaaccagaaggtcgacggatatttttgactacgtatacttactaagcttcctgcaattgaattagaaatgtaattttaaatacctcgcacggtattcttctcataaaaaacaaatgagttttcaaacattccaaaaatatttgaggataaactaaagtaagccggttttagaaattttgcgtctcaaattgtccatactgcatttattagccctcaaggtgatttagcctgataacgaaagttaagtttgaaacatttgtctaaacaaaggttcagttccgtagctattcctcaattgttatttttttcatgctaaacacaattttttgaggatgtttgcttgacttctaaatgctatttactcagttggaaagaaagtttataggtaaattattgaatctcaataatattcgttaattatcatgttttaaaattcaaaaatatgaaatccaggtttcgaagcattcgtaatcaggtgaatgcaaaccttccgatgacctttttaaaaatcgcgactcttggtataatgataataaaaaaaggataaaacttacacaccaactgaatattgtatcccatccttaatttgagatcccttgtattaagattacaatggtgctgttttatgaagatattaggcttcacaattgaaaatatttttgtatagtactagtaaaccgctctaaaccagcttcaaaagtgcttaggtcagcaagggaataagcaaatcgaaaaaaaattttgtccgccgaatttggttctcccataaatagctgtccacaaacaggctttaccccattgttaacaagttctacaaaaatttccatctcaatttccgaaatggacttgtccatatttgagcaaataagacggtttttgtcaagttcaacccatagaaacaatccagctttaggagaatgatatttacaaacagattttggaagatgtttgtcagctgccaaaagaagagcatttcgacgcatagtatatgagttttgcaaatcttgtagccactccaaaaaaccattttgtccccaacgatttaatatagcatagagaaccacttgagagacgccggatgggctctcagtacaaacttctgcgtaacgggttatgcgatcgatgaatagagaatttccagttatccatcccaaacgtaatcccggtacaatcaatttggaaaaggaatcaactcgcaaaaccctaccgtcggtatctagatggagtaaagagggaattagcttttttttgaatgacgaaatattgaaagcttgcttgtcaggtttccaatttgcatcatatttttccatttgcaaaaaatagtatggttcatcttcgacaatgataatatcgtatttttttgccaaggttagaaacttctttcttctttccaaagttaacgtggatccagttgggttttgcccagtcggtatagtatacaaaacatggggccttgctcctaacgatgaatcccatgtttccataactttctcaaaactttctggtagcatgccgttttcatccatgtcaatgggaataaatttcacaccaaggggacgcattgcggtaattgcggcagggtatgtatatttttctatgagaatacaatcaccacggttgacgagcaatcgcaagcaatactcaaggccgatcgtatttccatttgttatttttatatcccagtccttatattgtggcatgtggatttgtccaacgtgatcttttataaacttgaccaattctggaattccttggcactggccgtactgtaaagctcccagtaaatccagagaaccctcatttgcattattacttaattcataagacacagttgcgtccttgttcgtgtctttttcccaagaatttacttctgggaaggagaccgaaagtttatgaatcgggaatttactgggattgggttctccaccagcaaaggaaagcattttgatatccgagtcactttgaatacgacctaacatctgaaacggaccatactcacgggatgcgctttctagggataaatgatgttgatattttttttttaaattatccatgtcgacgaagtatatgaataatatacataaacttaagaggaaattgtggtttaatttataaattgatactctcttcaagtctttgtatcagatgggtttaataatcttgccggaaggttaacaaaagtgtaaacaagttttgattttgattgatttcaaatatgcgaaaattaagtagaaacactctaatactttgatgtttgaagttgatacaatcttaaatattatcttacagataggaaagactagttacaatcatatttttatcaaatatgtaggaagggaagtatgcaaattttgaaactccgtggacattttaaaccaaaacagcatattagaaagcaggaaaaatgaatatctcaaattgaaaatttggtgaacaaagacaaattagttaccgaaacggaagagaaatacgatgttgattacgacggcacaagcaatcttcatactaatatctattaacagtttgtgatagcatactaaaagttgcgaaattagctcgattttttttattttcattttttaccttgaaaaaggcgagtgcagtgcagtcattaaattaccttaaagtaggtattaatatcttcactgcttcttttgctaaagcggtgaccagtaatataggtaaaccgttaggaattacgatagtaaactcagctttaaatgaaactgttgcagaaaataaccaatacttcatcaatcctttcaatcttggaaactaactaaccccactctaataaaatataaatagaaagatcaagagaattgaaaaaatatatttttttatgtgctgaactagcatcttctctttttttctgctttcttcatattaattactatatttattttctgccgcgatcgatcacctatctatctttcttcaacaacgttgtacacatacagtattttctaattatttttggattcaaatagatctccaacggtttgtactgatcatcaattaagctaaaggtataaatatgtagcgactttctctttactcatcattgcatttcgcaatacattagttgctatcagcaatactgcactacggaaggatacattacgttgcgtatcactatatgtcatatcttggaaaactagttaagattcgtttattgatcatcacgggagctaccactgaactgaggaacgaggttcagttatgagctatattggtgaccgatactaacagacttcttataacaataaatattcattgttagttaacataccacaaccgctacattgtagatcgcaagtaaaaactcaccgcagttctttgtatcgttaaatagataacaaactgcgtagctgacagttacttagcctatgcagcggtaaatctttcataatgtaatacgtaacgttaaacgaagaaacgtataatgtatatgtttaaagatattgtaaatagtaaatgtaatattgcatagtattataatgacacttcaagagtttgcagaaaacgtaggcttagtctagttaaatctatagggaatttactcaattcaagattacaaatataatctttgaactgcaaaaatttaaacaacttagtatattcagttttaacgaccgctacgtagtgtaatgctacaaaataagtctactcagatattatgcagccgtactcatctgattttgtttgtctacaaaaatgtaaacaaacaattattttatcgcattgatacaacaaaccaattgaatatcgccttttgaagcataaactttgcatttaaaagatgaataaacaaaggaagaagttaattggatctcacaccgcataaacgatgcataaagtttgatgtggtgtcgtaacggtgtattataggttgttaactgagaggtaaacatcaaacgttttccgattgggtccatgaataaagactaaaaatgagtaaatgtaaacaaacctgactatatattgagactattttgtcaattgaaattcataacctcacttccattcatacagctaaacatttttcaggattttagcttgaaaaatgggaaaacaaataaaccagtatctttagaggttgtcagtatccatatcttaaacaaaaggttaaatgcggttatgagtgtcatcaagcacgtttccgtaatgaattaaaattcaacaaaatacagcgtgataaaacaacgatacaaatcttgattttacaagttatcgtttgttctttgtgattatgtttatcattatcatcatttacttttattaatatgatgactagctttcctacccaaaagcatgttattgtattagtaatttggttacccgaaaaagtataaaaactttttcactggctaccctcttttggttacttcctatggttgtaaatatttggaacatctttactttccttcttcatcgttttaggaaagacgacattgttctttatatttcgcattactgcatggtcggtgaatcatttatttgaccaatgattcaagtcttatactctccaattgatttagagaattaatacttggtaactcgtctccattgtaaattaggtcaaagcaatgggaactattctccataactacctaacccagtgttttgtacttctggaagcattataaataatttcttttgaaaaataattgttagaatttcatttttagggacatttaaaatgattaggaaatttacactgctatgtacatttaattatgcccacatagattgaaacgcaccaataaaatttgtgaatttccataaaaaatgcattttagcagtagattattgacggtttatgtattcacaatgtcacatcgattttttaaagaagaaattatgagtaagccctaggaattccaaaagaattgataattaatctatacctatatgttaatctaaagatgcgaaagatcaaaatgttttatactatctccttgaccattaatgcatccgacgtttttaagatttatctctgacagtaacgatgcggtatactagcttttcgaataaacgttccgacaggaatttaccaaacccatgaacggttatggttgctctgtcttgtttattcagtagatgcataaattgcatccatcgcaaaatgtagcgatgtatcatgactacgatacaagactcgttggactaaatagaaaacgaaaacgccaatttgcatttcattatttaaacctaaccaaatgtatttatttaaaaaaaaaaaaaaaaaaaaaaaaggttactattcatgctccttgacaatttcatgaaactagggaattagccttgaaagaactacatcaaagttgtttttttcactctctgttatgcaggatcgagcaaattttctatatgtaaccaattttactaacgaaagacatatggaaaaaatattattcaacgagatacgccatttaataaatgcaatagatatataaaatatcgataaatatatttaagagtaaccataaatggcgttaaacaacttgtgcagtaaatgatagataaattggtatgaaagttcagtaaaaaaggaaatcgagctctaagatctgagcatatttgaacaaataatctgagtaatttagaaagttcacaagcctgcgaggagaaaaagttaaaagcatataagaaattaaaacttttctagactagggtccttatggccatcatgctttcctaaaaaatcgtctaattgtaaggatttaggctctgcaaacagtttgctataaggacctaaaaggatggaaaaagccacaaacttaataccaccatttactattttaaggtactcaagagtagtatcatcgtatttccaaagtttttgcaatttgtcgaaaatcactaaatcattaaatgcaaaaagaatgatgatagccaaagtcaaggcaaacaaattccaacgggtatcaaattgggaggcctttttcaaacggaaacggaatgctagaactgccccaagaaaggtaattagaggcaaatacaagaatttattaaaaacccaaaccattcgcaacacacaagccttatcactgccagaaatgtaaagaagtggatataccattggagccacattgactaagaaagcttgtccacatgtcaataaggaaaaaaacaaaaccatttttttggatgttcgacgaattgtgccaaatccaaggacagtggtggtaataaataggctatatagcgcatattcgataccatcaccaaggaaatatgtaaaacaagaaacaacaaaaggaactaagtactcatctgggttatcaatgctgaaaattcgttgctttacagggtgatttaaaataaaaaaggaaaaccaacaaaacaagcaaacttgaacaagatgtaatttggtgcgactacaaatacagcgaatagcccaccataatgagattaagccatatacgatagaaaatgataagaaaatttgtcgttgaagttttaacgtcacgggtacattagaattaaaagaatcaaactcaattgttacaataggttcggagttctcaccaatgacagtttcctgatgagcgacttcttgatatccaacaaaacagtaaaatccttcatcttccacaggtattgaataagtacggttaactgccgaatcaagagaaacaactagactctttctcagattctccaaaaacactctatccaatccactatactttccaccattgtcaataatatgtttaaatgcttgaaagggagatggatgataaaacaaaccaaatcgagctattccttcaacattctcctttaattgaagtttagcgtaaggtgctcttgagctatcaccgtcctcgctttctattgcatcaagataaccacaatattcaaaaccacttcgatctacaggggaatgtaagcctaagtcactttgaaaagggataaacatcatccgatctccgaaaccacctttcacatccggcttcatcgacagcatctcagaaggacctttttgttctaatgactgaggaactttctcaatcgccccctctactgaagaggcacaagtagcggttgacataacgagagcactaaggcataatgggaagagtttcatgctgtgttctggcaagcaaacaatcaaaataaaaataataaaacgattaaggttaattgagtaactaatgggttgaaaccaatgcaaagtcaaaatgtaaattatagatataaattattaaggttaaaggttcctatgtgttgtagtaaggttgaaaatagataaatgaaaaaagcgagaaaaagtggaagtcaaaacggattgtacgttgtcctcaagcgaacggaggcaattctacactacgttgtgtatcactatctgttacatgttcaaatgttcaattttgctctatcaactttacatgataagttatcaatacggatataatatcatttgtagtaaggtaactaactatcagttacaagtgttgctttttcaaatgctataaattagagaacaaaatgaaactcgttcctcagttcagttataagctatattagtgataggtaacaatataacctagttaatacaatacctatactagttgctacgtatgttacctgcgtattgcaatataatagatcacaaggaaaactcaccgcagttctacgtatcgttgaaacggatatcaaactgtgcagatgacatatcaaatatgtagcagacgtaattttccacgcaaatcttctccaaatctaactactaagtcaaacaaacctcttcttcaacgcgatatttagacgaatcttaattctttctcatatcgaaaacccttgaatcgggagcttgactgagagggaatgaaatgttatgcgcaaccaagtgatataaattagtatatggacttgaaacatgaaagttggttatacatacaaaagagtataaataagccaaagtgtgatagcgacattagcattgttagtaaatggatgcttgagtgtttgaatactttttcatgaacaagtcctatagacggacagaaaatatattatttagggtcaagatgcaagtgggaaaaattttttttggcgtaaagtagatctacatagcgcattaattgacttgtaaggtgtgatgtttaaaaaccacgcttttaataaggaagctaatatagacagatatatccattgaatacaataatggttgggaagttgcctaaaaaaaaaaattgtttccgaatttgatctgttcgataagctgcgctatgtgaacattatttatacaacaagcatctattctagatcctcgttatatcgtctcgttattccttttacgaatcatacaacctagtgcattcgcaaacgatgacaccgataaatagggtaaaccgttaaacaccgaaatccgagcgtctcaatgttttgagcaaaaatacacataaaaaaggtatgggatttttgatcgtgcattttcttttttaagcggcttttcgtgtatgtttatgagtagcagaagactgtatattcgatatgtattttggttgtctaccataccacgtacttacgacttctaacataaaagttcttcattgaatactttgtttggtttaaacttcttcattttgtcaatcgcttcggaactaatgaataaagcctcgcttttcggattaagctatttctccggttcgttctaactggctagtgactactttccccccgtagatcatggcgttatgatgtcatatatgctaatctttttcaaaaaagaaaatatataagaaaatggtaatatgtcttctcctttatactagctttaaaagcaataaaagatcgttatttgactttgcaaaaagttgttttacactattacactcacttggttttacatggctaattgtgcttacaaatcgtgtcgcagtattttttattatctgcagtgaaagtgaacgattactttttttcatcgacaaatttttttaattacttattttgcacttttttgtcgtttattatttttgtcaagcgcgcgttgaatcctagtttgcattcgaacaaacttgctagcgactggtcgcttactaatttatagacttgaccatacgtaactttttccctactgaccttcgctttaaaagagaaattccttttctatttcataaccatttttattataatttattattccatttacattcctatattttgcatttggaatttcgttgtaaacgtctacttgtgtgttttaatttcatttactggatttaatttaactgcgaaaagtgaggtaaaattttttccctctgttttatttcatttccacagcattcattagagtagtaataattctagattggcaatgtctactaacccgaatgccggtatacaaccattaacgaattcaatctcccagtctgcttcggctcatccggaactatatcataccacaagccatgagtctgttagtacatatcaattgcaatcacagctttctcattctgcaacgtccaacctctcaacagctgccaattttcataccagaccaccgattgctaatgatgaaaatgctcaaaatttgtcaaccgtgaatagctctcactcatcagaactttccaaggctaacctagttgatgtggagaagtgcattcaggacccccttttgcaaatatttcccaccgtcgaggatcctgatcggtttgtcttttcaatagacccaaaaagccctttgatcgctgtaaattggccttttagaaaaaaactgaaaatcacttgtgtttattcatatgtcgctttgtgttctacttttgcatcatctgtcttttccgttcctgccgaagctattactaccatttttcatatcagtttaaccgtttctttgttaactatgaccgtatttttatgtggttacattgcaggacctattgtttgggctcctctgtctgagcttagcggcagaaagcttcccctactgattggaatgtttggattcggtattttcaatattagtgttgctgttgcaaaagatatccaaacaataatgatgtgtcgatttttcagcggtttctttgctagtgctcctcttactgtcgttgctgcagcatttgctgacatgtattctaacaagcatcgaggtaccgctatcaccatctttgctgcactagtgtttgatggtcccttggtgtcacctatcatcggtggatttcttacaaaatcatacttgggttggagatggacagagtacattacttcgtttatggggtttttcgctttagtaattgtttatctattttgtgatgagacatactccaaggctattatacgaaataaggcaaaagagtatcgagctatgagcgggaattattttgtccatgctaaatcagaagaggaggtgcttaccgtacctgacgttgcaaaaaattatttgttggttccaatgaaactgttgtttacggagcccatcgttttcttaattacactgtatagctcatttgtttatgctatcctttatttattacttgaggcttatcccatcatctttagcgagaaacgacatttctctatgggtgttgccgaattaccatatatcggtctcttggttggagttttcattggctctgccatcaatatttccttcgagccatggtactatagaagatgtttggcacttggtgggaagcctgatccggaagctcgtctacctccaatgatgattggctgctttatgtttccagccggtattttttggttatcatggtccggttattactcttatgtacattggattgtgcctacattatccggattagctacaggttgtggaatcttactaatttttttacaatgtctaaattatttaatcgacgcgtacttgtttcgagctgcttctgcagttgctgcaaacactattatgcgaagtgcaatggcggccggatttccattattcgcagtgcaaatgtttcacaatatgggtgttggatgggctggctcacttttgggctttattgcagttgctttaatccccatgccttttgctttctttttctttgggcggaagattcgtgaaaaaagcaagatggctgttgtattgtgaggcgtcaacaaaatggttagactttaattcactttttgacttaatttaattttctctgtctccgggtttgaacgagaaggaaatatttttatatatgtctaaataaatacatgaaagaacgtatgtatttttattttttgttgttcgcttaaaattcgttatcggtaaaacttatttttgattttcagtctaaattttcgcattgtttactttgcaggtttttctgtttttacttttttttgttgtataaataatttgaataccgataattaaagaaaaggaaacgaattctacttttttttgtaaattgtagaagaacaaacgtgagaaaacttttacgctcaatatgaattaaccttttgttatacataaaggttcaaatctctattcgaactcatattcacgattattggatggtattgaagtactgttattgtggaacaatgtctcagcttaacaaaattaaaaaaataagtaaattatatggatttaaaattgaagaacacctttataaaaaagaaatattaaatttttttacattataactgcttaaatttccggttgaaaatagtgttgatcctttgtaggtttagcaaaggacaacttttattgttaccaacttctttatttcctaaaaggaatttagctgatttcacaattttctgttaaactttgtctatttgtcaaatttgaaaatgggaattgttactaccattaaaaagggcaagcataaccggcccaatataggtttttgtatttggactagacaaaaatatatagattattttttgttttctcctgttttacatctgaaccttttgctatgtcttaacaatcaaataaattatttaaacatctccttcgtttgattaagcattcttaattgacctaccaattgaaagttgaaatgaggatggactttacaaatattcaaagttttcctatattcgtataacgaagtctctttgttattattgtcaacattttccaaatatttttcaggatcattaagtattctgttagtgctcgtatgccaaggagtacacttatcttcatccgccttcaatatcaatctcaaactatgatgcttggttttgacttttaaaaactcgtcaaacataggaaattgtgtggaatcttttttctgtttctttaatgagtaaatctccatgcagtacagaatgggcccgagtttgcatcctggcatataaaaaaattattcacgtcaataactctacgatttatcaacaattcgttccctcccacatgagaaacaatttcccattcaagaattcgaaagcaattcttcaaatagtaatgagtacgagtgtctgttgtgtacaaaggccttttggggtagacaggcactttgacagcgaacttcaagcgactgtcaaatacagggcgtgaaggaactcctctcagtaagactgaatataagtatggaactagttcttgtatttcaactttacgattttcaccttttctgttttcatcacatagataagaagtagacattctcaagtcttcaaaatacgtcccacaaaaatcacaagtactatccctttctttaacaacatcagtaaatatcaccaaagactttaatggcttcctttgaaattgaaacctatcaactttaatatatttctcatacacttttcgattattttatcaaagccaggtaaaacagaatgttcagttttctcaatcccttttttttgaaaggtataaagtcttctaaaggattatttgtagtacgaagttgacatccacgccgaaattccttctgacatctgcctgaataaataatgaacgaactaaaatcccatataagtgaaatttgaattaaattagttataagtactatagtaaataataatgatttcgattgtcttgcatatgtcaatcggtatacacagaatcgaggaacacgatataaagaattacggcatgcaattgaaattaatgtttggtgtatatactgtatagtagctctaaattctttaaaagaagaaaagagattataataccaaagagattatctgatggtgtatgcatttagacaagatgagataactttgagcatgaataatatatatttggctaccttttcatccaaaatgttgtcgttatattttgggatgacagaacattgagtataatcagtcgtgctacacgtaaaattctgattgaaaatacctttaagtctgtcaaatttctatttatgattctataactgaatattgatcaacagaaaagcgaatagcttgttttcatacacttaaatattttatttctttaaaaagccagataatcactacaaaatttgtacttcagatatatgaatttaaactttgagtagctatctaatgatatgagatagaaactgctaaaacactatgatggaccccaaaatatgtttaacaccattaatcggttgaacgtactaagaggtagtagctcaatggttgatttatgcgaatatcgcatatagggtggatgtctaattaatttttgcaaggttgaactttgaaaaaatttatttgaattaaatttaatactactaattaaatacgatttattgcgcttcttaattatttcaatagttataaatgagttccttataaatttgtttgtattttttttaaaaaaagaattaaaagtttagaaaacactctaaaaaaactaggcgaatctttattgtgtacatcaacttcaatttatttcctattaattttaacacaaacaaaacattgtcaatcattaattaggctcgatgttataattttcattattgttgcagtacaaataaggagactgcttgtataagttgagtagcctaaatgaaattttctaaattggaaacatcttcacaaagtactaccgagtgaaatggtgacacactcttacggaaattttaacgatagctatctattttttaattgctcaaacacatttttaatcaacaacctcatttttattaggaagaaaatgaaagatacaaaaggattttgagtgtaagaaactaaaatctagtaaataatgtccggaaagcaatgattaaagagcatgcaaatctagagactgttttttgcaataaaagacatattggtatttatttccatgtttatttgtttagggttctaactgttatgcgaaatcaaagtccaagtttttttttttgacattatcttgatggacgatagcttgcttaaatcgcttattttcttttccatgtgttacttaaacataaacttcacgttcaatacgatggtgaggattaacatcaagtacaagcttatttatactagtaattcgttttttgtataaacgaagtatgaagaagtacgaaaaaggcgcgattcagctcaaaagtgagttttgggcttcctttctttattaacattatgaaatcgacttttaccgaacgggcattgcaaatgtgatacgaataaaaccgaatacctcgttggttcatgatacagttgaaatgattttggaacccttatcagtcaagatgtaaaggatgagttcgatagataaaatatctcaaggttttataacaggggagaaaaccattttcaaaatttccctctaatgactcctaccgctgatgcactctttttgaatggtttatcttagtaaaatttaaattcactaacagctatggaactgtatctattaacgtagataccgattatttagagattaaaatgttgtagagctatttcccaaatataactttacacaggatagttattctgaattttagatcgttacaaagtgcttttttaaccgttttctgtatctaagttcctaaaggttcaatacatcgaatatgaatttattcaagctgttgaatgttactgtaaccacaaggatcttagctcattgtaatatgagagttagcggagatgtgcttatattcaatatgttatcagtcaatgaggatgaatacggactagcaaaccaaagttgcttccttaataaaacgtatgtttttgctatagaagcactaatcgattacagaagcagacctttatcctaccatccactactctcttaaccgagtcgtcagaggtggtgacttcgaatagcccatttggttttaatgcgaacacaaattaaattaagctacgacagagaagagctggtactgattttaatagcgtaaaagtgatgtataaatatcataataagcacaagtaaaaaacattattctactaagagaaaataaagcagcaagagatatagaaatacagactccttaaaacgtatgatacttatgtgactcgtgtccttttgaccacaagccaatcgcttcttgaagtcgttctttcaacttgacagtctcaagaggactaaatttattaacaccatacccatgaagatactgaatacactgttcctttgtcaaattatcaatgtcttcgaagcttgcaagcggtgggagttcatagtctctaggttcatctccgttaaggaatggtactggaacagccgaataatgcatatctgaacggaccatattttcatattttcttgttagcatcatcgacttgcaagaacgatcatcaattttttgcatcgtttgagccatattgttaaatctttcttcagttctttgatccaaaagatcgatttttctatctaattgagatatagaatctttcatggcagttacttcacccttcaaagtagttgtttcacctttgacggaatcaatgtcgtttttcatgatagtcatctcacccttcatttcggccatttcacctttgacggaatcaatgtcgcttttcatgatagtcatctcacccttcatttcggccatttcacctttgatggaagcaatgtcatttttcatgacagtcatctcacccttcatttcggccatttcacctttgatggaagcaatgtcatttttcatgacagccatctcacccttcatttcggccatttcacctttgatggaagcaatgtcatttttcatgacagtcatctcacccttcatttcggccatttcacctttgatggaagcaatgccatttttcatgacactcatctcagtctgcatagcgtcaaacctagaattcatgtcattttgcattgagtccattttagaaaatattcgttcgaaaattccacctagtttagtgtttgcccattcatctatccagcgtggaaattgtacttctcccgattgttcctccgaaacttccctttctatcgccaatctcttccaattccgcaacttttgatcacattcagtttcaaatctcattttatgttcctttgcttgacgaaaattttcaatcgtttcttgattattctcgtcgaattctagtaaagcagaatttagagatctttcgaatttcttgatgaacagtttcaagtcttctgctgaatcatctggtggaggtaagtcgaaaccattttcaaaattctcgtttgacgtcatttttaatcaataatgagcgcagtcaaattttagaaatatggtgtatagttctagtaaatgttaacgctgtttattaaaagttggtagagtgctttaaacgtattgttcaatatgtatccaggatcaagaatatcaggtaaaaatacagttacaaagttatatcagtttatgaatatatataattttcaaagcctttggaaccctcattatctacaatgaaaacaaagcatgcaaaggaccaaaagagataaacaaagaaaacaaaacaaaaaaagggactttaataggtaaggataatgaaaatgtctagtggcgcagatgtttagataaatagataactacattatatgtttacattaaataattccaatttgaaaatgtaagcaacttaattctaacctgtactcatctatgatgtcaattttctaaagacaaaattaaaataaaacaaagataagtttttaactctatcttttcagttgtttggtgtttcttaaccttcatcccaagagtatacaagacaaacaaaacattgaaaggaattatattatcactcaaaactgctttttcctaagaatttgactcattgttgcaaggttttttgtttcgtctagcaggaaaagatcaaagattattgctttgaacatattccaacaaattccaagtcggttaaaaaaccgtttctatgattttaacgaaaggtgctgaggcagtgttctttcgctattcagtttgatattcgaaagacgatacaataagatgcgctggtgtttaccaataacaagttgctacatatagtacctgtgtattgcaatataatagatcacaaggaaaactcaccgcagttctacgtatcgttaaactgataccgaactgcgtagctaatactgactcctcatacatcaaatgcccccggcaacaaccgagttagtcgcatgggataattatcatgtaatatatcatttcaatcaattaatattgttcaactaaaaaaattaatttaaaagtagaactcagtatatacactttttttctggtagttttataagctaagaaagatccaacattagaacctgtcagatcttatatgttattactgttttgtatttgttgtgcattcataaaacttgtcttggctgaggtgaatttgacttttgttgactatgctaagctgcctcccaaatatgcagaattacttgctaatttaactgaccaacatggaatggtgctatttgatacagctgatgtacgatttgaagcttacaactacttagtaaataacattacagaaataaacactgataccgatgcttgcttatgtcaacttctaacaggtcagtataccactgattgttatatatttgatgacagtgtttatgaaggacctgaaaatatcaatccttcaacgagtatattgattaaggattaggaccgtagctttggcaacgtacaagggacgaacaagagacaaaccgtgtctcttgctttttgtggtgtgttgatagcgcatcagtataatgttcaatatcaatatgtcgatgatagtcaagctaagttggtttgtgacaacaactacggagtttcatggagttgcatagtaggaggtcaaagctttcgaagtttaggttgtctagtacagaaatgtgaaggacactgtgctagttctgaacagacaatcaatggagctggagtcaattccaagtttacggactactactagagaagtcgtccaacaggttgtactcagctatttaagaaacgcaaggtatatagcgtatttccatttatagatattgtcattgatgatacctacgaatgaagtcaccagcaattttatctcagggtagtaaatggtgactttatttgagatcatgtttagagcttagtggtctatgaagttgaactagtccgactcacaaaccagatgagatcgcccgatttgagatgattagaataatattaattttaactgagtgaataatacacaggataaatggtataggcaggattaagagatgtcagtacttgtaaaaacgaagcgagtaattggataataaatatgggttaaataaatgtcaacttagaccaatagttagtcaagaatatacaaaactcaatctttccaaattaaataaattgtgtttatgtacgataaaagttccttttggatatcaatgtgtaacattacgtaaatgggcaaatttgccattttattttttattcaatttatttaaatatagttttctttagaggcgtttctattctatctagcattttcaagctaaatgacaattgtacatatcaagtattatgtaggagtttttacgtatttgctttgtgcagtttacctattatatttgctcatagtaactatttaacagcagaggtatatttcaatgaaagtatacttgcttgagagtttcttaaacatattgtttcaggaacgtgaaaaaactctttcgtcttaaaataattgggggtattctattaagctttgtttctttcattaatttgcagaggctatttcaataaccagtttatatcccttgagcatatattgtagctaccgcttatacaatctacaaattatctagcttgaatgagtaatgtgcttttgattaaaacaccttatgattgctacaagctgttaagcagcctttgaaacgaataaagtaatccaggctaacgaaattttttgtatcaacattgttggccatgtttgcttttatacatgtactcctctattcaataaatctaactttgtaataagttacctgcaaataagccatttttcttttattttacagataaagcccattttcattatctgtatcacgtactcccaatgtgaagttacttaggttaccttgtttcttaatccatcaaaaactcttttctttgtccttagcattctttgtttaaagttgtatataaggggaacttgagagatttgaatttacttacaacacatatattaaatattgctttcaacacacgtttgtacttttattttccaagatttccctttctgagaaatatttgtcaattagtaaacatataaggcaggctacaaaagatatcatttgtatagttatagtgaattgcaattttatcgttaaaaagaatactgcggtttattgcaactggttttgtataaataataaggatgatgtcgaacgagaattttgataatgactacaatctgccaccaccaaatgattctgcggaagatttaaaaattttcattaaaagatacgagagatctgtagattctacattgttagaaattgacgaaaacaaaagagaagcacttgaaaaatatattgaggaacgagatcgtaaaatgaaatatgaaattgaatgcaatgaaaggctacaaggatggaaaaagttagcgattgaaagagaaatttctgaagaacaatcgggagaagtacaatttccacgctggatagatgaatgggcaaacactaaactaggtggaattttcgaacgaatattttctaaaatggactcaatgcaaaatgacatgaattctcggtttgacgctatgcagaatgagatgaattctcggtttgacgctgtacagaatgagatgacatctatgaaaggcgaaatggccgaaatgaaggttgaaatggttgaaatgaaaagggaaacgatccgtttgaacactagaattgatttactcgagcaaaaaactgaagcaaggtttcagtcaatagagcagcgatttaattctatagaccaacgatttaattccatagaccgaagatttgattctatggagcagcgacttgactcaatggatcagaaaatggaaacaattgatgctcgctcatgtaggtcgatcatgttgacaagaaagcttgaaaatacaactcgttcagaccaaggttatttggcatcaccagtgccatttctgaatggtaatgagccggctaatagtggattaccgccgatagaaagagtcgaagacattgatgaattatcaaaggaacagtgtgtccaatatcttaagggatatggtataatgtttagtcctgctgaaactattaagttgaaaaagcgacttcgtgatgcagtaggcttatggtcaaaagcgagtactgaatatgaatttcatcagttccattgaatttatgtttttgttcaaatatcttgctttctcttcgttttttattgatactttgattttttattgtatattttcgctttgatgttttatgtttcggtgttaataaacgttttttaatgaaattgatgctttatataattagatgtcaattgatcccttctatcgtaaagcttatatagtgaaagacgtatatttgcaattaagagcaatttatcttgtccgcgaaaaggttgactattttacaaattgtattcaacaactaacaaatcccaatttttttaccataaatgttacttgctaatatttattgtacagatagctttccttgcgatagatataactttatttagcggaatatctttgtggactatatgagatgaaggtctggttagtgcctgcagctgacaatacagaagacgatcactactctaataagctaaccggatttttttcaccgaagtataaattttttttgtaactaatattttacaatttatattttatttcgttcaagaaattcatccgttttggcatacagcttcctataattttttatttgttggttttgtgaaaacaaatatatgactaggttttttcagatccctgcatagagtctaatgaaattgaaaaagaaaaatgaaccttttaaagaccaatcaacacttctcctttttcatgacaaagtctaaagacgtccatgatgtgataacgatactttcactttcattatgatactattatatttacccttttagtagtaagtgagctcaatgagaatataaaatttgaaaagatattcatgtgtgctaacacacttttaatccaattccttgtttgttcgtaacatacctggtacaccaatcttgcgcataatgatactgtagaccgtaaggaaattgtacatagttgatgcatcagatagttaactaataactgtgcaaagcatgaaattaaaatgggccagaatttcgtaaatcggttagcttattgcaaaaaaagtaataatatttaacgaattccacaacatgtactaaataataaatccaaattaatacggatatttgccctatgaacttgttcacatttcgataggtggtaattatgtaaaatatgatccatattttttgtattcgtgcgtagttatgtaatagttggtaaaagtggtacttttgaaatacacatactaattgtaaccgaaagagcgaaacagcattatgagcctacagataagatgcgatattttttgctctaaaatatcgtgatttgaaaaaagaaaaggaactatttttttgagctcaactatcttatgcaacgaacacaaagaaacccggcctaattaatttgacttttgattaataaagtggaaacaagagagaagaaggaaagtgaaataataaggatagaaatactacaattcaacttaaatgccatttttacattggcggtcaatcatacaatagttaggtgtgctaataagcaatggggttaaaaccttttgatccttattctgaattttaattttattatgaattcttatgatataagtcatttagtggagacataatccatgcctcagtaaatcagaacatgagcaagtgtgaagttcgagtggcgacatccaaagaagtgctcataactgttcttgtgcttggatttagtttctgatgaaaaaaatcggcaaaccgttgctgcaaggttggcaaagttaaacgggtaattgtggaaacgcttaagaagaacgagcttctatcacattgtggacccctgaattatacgtacttcctacacggtgtaacagttgttagcgataatacactgcgttgcatatcactatatgtcgcatgttctatttacacattgtaccatagatgatatgatattgagatagaattgaatgataacttattaaaatatgtagtaattagaataacgtagatagaagtaaagctgaagctcgtttctcagcttagttctagatcggttactgatactattggatttttttaacaataaatataacactattgtttaaacacacttagtatatcgcaatagaaactcattgcaataaatttattgttaaacatataccaaactgcgtagctgataactaaggtaattttaattatcgttcattgtcaaaaacattgatacgttgctatactgcaaagtcgactcggaatgttttgtcaataaatcgaggccatagtaagcgcaatgatattaaaatctttatgttataaaaaataactgtaatgaaaaccaatgtatcttgaaggacattttttatctactttgctcacaacttctcaaattgataacagaaaatcaacggttgaatatgacaatcaaaaattttgtacgatgaatatgattttttatgtttatgcttgtgtgccgaatttttagatttctaatgctcgagatacatcaaataaaaccagtccttaataacgttttttaaaagtcctatctcttaataataatcatctgaataaattttttcatgcaccgtttttttatttgataaatcccataatcctaaagcatttaataacccctatcatcgtctcactaatctattgcaatataatcgttaataacccaagaaacaatatccaaatttatcagtcttctaatttgttatcaccgatcataacttctggtttgttttattctttaatgactttacatgcaacttttcttttttcgttaggtttcagttcttaggtatcttacaataaccagactctttcttctttctctactcatttctaattataatttcccctccttttctttctattatagctgttatagatttttttacacgtatcatattttatttttctaatcacgaggaaatgaatcaactgctactaaaagttttttgcacagtgacacctataaaataaagtccttatagacaaaatttacacacagtgtttcgtttttatcgtaacgctattactcagtaatatactaaattgatattttcttgtgaattttagaaacagtgctgtaatttgcacaacaaactaacgagacttgaattaataaataaaatcattgataaaataaagttgcactcaactcttacaaaggagtttctttatccacatgttttccaatgcactctctaactagcgtctaagcgtcctgttccttgattggtgatagcagttgctccggtcttacagtctgataataaccctgaattaaattcatagtattgagctgtgtattgacctcactactaagacttgcatgactacttatgtattgtcgtacgaatgttgcatacacttcagcatcatcttgacttgattcaaggtattccgccaaagaaacaattgagtcttgctcaccggaatttgatagtatatctaatttatcagagagtcgttcaagtggtgaacttgtatttccatggatccaaggtgctctaaccaacagggcttctaaagcttgtccatattgctgcctgctatacaaatcatgtatttctgaaaagaaattagctactccctggtcttgagaatccacgtaagaagtagctagccacaggattgacaggaaacttaagttatattacctttataaaaacataacaaacttgaaaatcaaataaaaattcatcaaatgtaaaatgcccaaatagcacaaaccactgattactgaagattacctgaaacttaaaataatattaaaaaaactacaaaaatagttaaagtttttaaatagccacttcaaaaatcacgacataaattaattgctttggccgagttgctagtaaaagacacctccactaatcaatgaaagttacaaatgcaaaacctaaaactaaagttgagtaacgactaattggagagtaacagaagaagtagttttgtggtggtagtagtaggacttttggtggagagaggagggatatggaagaaaggataggaaataggcaccgaaatggacgaaattcacacaaccacaaatgtttctataaaatcgaggaaaaataggtccaaggaactatgtaaaaggagtggtggttgaaaggagaaaagaaaaaagaagatgaaaagaaaaaaaaaaagaaaagaggaaaaagagtttttaatagcttttggaactttttatttatttttttttttggatttggaattttttttttcaactttcgtaaagacttgctaatctccttttgctaagaattgaaaaaatgggaaaatggaaattgttttaattcttctctttgtgttggcatcgcggtgcattggaaagaaagatagaattttactattttatttttgtttgctttgtaacggtctttgattgtccagaagaatgaaaagaaggtccgtcaagttttttcatacttttctttttcttattaaaaattacatttttagaaaaaaggttgaacgagaagaaggggaaaaagaagtggaaaaggagactttctctttggaaactttttttttgtttcatcttttttgtaaaatcggttttttaaaatttgtaatttcccccaaacccggtaccttgataccgcaaggataagttggaaagcgagttgcagttgtctacgtgacggtgcttgactccgactttttagctatcctttagcagatttgaaaggagagttgaaggattttttcttttctcttttcctgctggagaatccgcgcttcacgaatccattgcaaaatggaaagaggaagtcttgtggagactcgatgagttttttctgtggatgtatggtcattcgactaacatttgaactgaaaaagtcatttagtggtaacaacagatcaacagccgtagttttttttttattaaaaactatgtggtttgatttcgtttgaaccacttctgaagattttgattttcaactttgacatggagtacaattttatctatttatataatattttggaaacaatgtttatttgttggaatgctaaaatctgaggaaattatgataccaagctggcaatttccttgtcttcagagaaacgatatatccggtgttctttaaaagagaactaggaaatgttgttcatctctagacaacctcatataaaattaattttttaattgaggaataatgggaaattgtaaaaaaaaaatttaggaagaatttattttcttttctcttttttttttcagtttcacctttgagtaacttttgtttttgtttttttcttcctgattttgttgggaagaaaaaaaattaaaaacggtagtggtgtgtgaaaagtaaaaagaagttttaaaaaaaaacatttttttatcttcttcttttctgctttttgtctcacctctaacgatagttacctggttgatcctgccagtagtcatatgcttgtctcaaagattaagccatgcatgtctaagtataagcaattttgtactgtgaaactgcgaatggctcattaaatcagttatcgtttatttgatagtacctcaactacttggataaccgtggtaattctagagctaatacatgctaaaaatcccgacttttttggaagggatgtatttattagataaaaaaccaatgccttcgggctttttttggtgagtcataataacttttcgaatcgcatggccttgcgccggcgatggttcattcaaatttctgccctatcaactttcgatggtaggatagaggcctaccatggttttaacgggtaacggggaattagggttcgattccggagagggagcctgagaaacggctaccacatccaaggaaggcagcaggcgcgcaaattacccaatcccgacacggggaggtagtgacaagaaataacaatgcagggccctttcgggtcttgtaattggaatgagtacaatgtaaataccttaacgaggaacaattggagggcaagtctggtgccagcagccgcggtaattccagctccaatagcgtatattaaagttgttgcagttaaaaagctcgtagttgaactttgagcctggtcgactggtccgccgcaaggcgtgtttactggtcatgaccggggtcgttaaccttctggcaaactactcatgttctttattgagcgtggtagggaaccaggacttttaccttgaaaaaattagagtgttcaaagcaggcaagttttgctcgaatacattagcatggaataataaaataggacgtgtggttctattttgttggtttctaggaccgccgtaatgattaatagggatagtcgggggcattcgtattcaattgtcagaggtgaaattcttggatttattgaagacgaactactgcgaaagcatttgccaaggatgttttcattaatcaagaacgaaagttaggggatcgaagacgatcagataccgtcgtagtcttaaccataaactatgccgactagggatcgggcaatgtttcatttatcgacttgctcggcaccttacgagaaatcaaagtctttgggttccggggggagtatggtcgcaaggctgaaacttaaaggaattgacggaagggcaccacaatggagtggagcctgcggcttaatttgactcaacacggggaaactcaccaggtccagacatagtaaggattgacagattgagagctctttcttgattctatgggtggtggtgcatggccgttcttagttggtggagtgatttgtctgcttaattgcgataacgaacgagaccttaacctgctaaatagctggatcagccattttggctgatcattagcttcttagagggactattggcataaagccaatggaagtttgaggcaataacaggtctgtgatgcccttagatgttctgggccgcacgcgcgctacactgacggagccaacgagttgaaaaaaatcttttgattttttatccttggccggaaggtctgggtaatcttgttaaactccgtcgtgctggggatagagcattgcaattattgctcttcaacgaggaattcctagtaagcgcaagtcatcagcttgcgttgaatacgtccctgccctttgtacacaccgcccgtcgctactaccgattgaatggcttagtgaggcctctggattggcttgtttctgctggcaacggcggaaacattgccgagaagttggacaaacttggtcatttagaggaagtaaaagtcgtaacaaggtttccgtaggtgaacctgcggaaggatcattagaaaagttatatgaaaaggttttaaaaaatttccatcttttaactttttgggaattttttttacctttttcttctcttatccatttacctttctgtgaaaatgtaaaatattttcaattttgatttttttttctttttctttatatttttttattaaaaaaaagtgtttagaaaagagaaaagatgaaaaaaaaaatgaaattgtaaatattacgagtggatgatttttgtttggtgtgtttttgttgcatgccaagcatatcattacttttttactattttattttattttatcatttttctattctttctctttttttttaatataaggaaattggaaaagaagcaaaattaaattataaaccttgaaatttgtttttgaagtctgaattaattatatctaatatataaaattatttaaaactttcagcaacggatctcttggctctcgcatcgatgaagaacgcagcgaaatgcgatacgtaatgtgaattgcagaattccgtgaatcatcgaatctttgaacgcacattgcgcctttgggttctaccaaaggcatgcctgtttgagtgtcattacaatcttctcacaaaaaatgtttttttttaaatatttttgatgaggtgttgaacgaaaatttgttttttttttaaaatataaatttagtttgaaatcgattggtgaaaacaaaaggaagattgaaattatttttctatgccttttttcattttttttctattgaacgtaataggttttaccactttgtttgatagaaaaaaagaaattaggaaagaaaaataactaaaaagttttaatctcttttatatttgaaccttaacgaaaaaaaaagttatttttttttcacagtaccttttttatttgacctcaaatcaggtaggactacgcgctgaacttaagcatatcaataagcgcaggaaaagaaaataaccatgattccctcagtaacggcgagtgaagcgggaaaagctcaaatttgaaatctggcaacatttcttttgttgtccgagttgtaatttcaagaagctgctttgagtgtagacgatcggtctaagttccttggaacaggacgtcagagagggtgagaaccccgtctttggtcgattggatatgccatataaagcgctttcgaagagtcgagttgtttgggaatgcagctctaaatgggtggtaaatttcatctaaagctaaatattggcgagagaccgatagcgaacaagtagagtgatcgaaagatgaaaagaactttgaaaagagagttaaatagtacgtgaaattgctgaaagggaagcattggaaatcagtcttacctgggtgagatcagtagtctcttcgcgagactatgcactctgaacctgtggtaggtcagcatcagttttcgggggcggaaaaagaataagggaaggtggctttccgggttctgcctggggagtgtttatagcccttgttgtaatacgtccactggggactgaggactgcggcttcgtgccaaggatgctgacataatggttttcaatggcccgtcttgaaacacggaccaaggagtctagcatctatgcgagtgtttgggtgatgaaaacccatccgcgaaatgaaagtgaatgcaggtgggaacgcccttgtggcgtgcaccatcgaccgacccggaagtttgtcaatggaagggtttgagtaagagcatagctgttgggacccgaaagatggtgaactatgcctgaatagggtgaagccagaggaaactctggtggaggctcgtagagattctgacgtgcaaatcgatcttcaaatttgggtataggggcgaaagactaatcgaaccatctagtagctggttcctgccgaagtttccctcaggatagcagaaactcagatcagttttatgaggtaaagcgaatgattagaggtcttggggaaggaatttcctcaacctattctcaaactttaaatatgtaagacgcccttgtcgcttaattggacgtgggccatcgaatgagagtttctagtgggccatttttggtaagcagaactggcgatgcgggatgaaccgaacgtgaggttaaggtgccggaatgtacgctcatcagacaccagaaaaggtgttagttcatctagacagcaggacggtggccatggaagtcggaatccgctaaggagtgtgtaacaactcacctgccgaatgaactagccctgaaaatggatggcgcttaagcgtactacccatacctcaccgtctgggttagctttgagaagctcagacgagtaggcaggcgtggaggtttgtgacgaagccttgggcgtgagcctgggtcgaacagcctctagtgcagatcttggtggaagtagcaaatattcaaatgagaactttgaagactgaagtggggaaaggttccatgtgaacagcagttggacatgggttagtcgatcctaagagatagggaagctccgtatgaaagttgcacgatttttcgtgcctcctatcgaaagggaatccggttaatattccggaaccagaaggtggaatcaacacggcaacgtaaatgaagttggagacgtcggcgggagccctgggaagagttctcttttctttttaacaaaccattgaactaccctgaaatcggtttatccggagctagggtatggtgtttggaagagttcagcgcctcatgctgaatccggtgcgctctcgacggcccttgaaaatccaacggaagaatggaccttcgggtccttgttttcacatctggtcgtactcataaccgcagcaggtctccaaggtgaacagcctctagttgatagaacaatgtagataagggaagtcggcaaaatggatccgtaacttcgggataaggattggctctaagggttgggtacgttgggccttggaacctgaacggttgctggactgagcgtggaccgatgtcttttctcgcctttcggggtgagaagggatgttggacctgcttggaccttggcggccgggaagtccttggtcgggcttttctccttctcggggattatgctcttactggcgtacgtttaacaaccaacttagaactggtacggacaaggggaatctgactgtctaattaaaacatagcattgcgatggccagaaagtggtgttgacgcaatgtgatttctgcccagtgctctgaatgtcaaagtgaagaaattcaaccaagcgcgggtaaacggcgggagtaactatgactctcttaaggtagccaaatgcctcgtcatctaactagtgacgcgcatgaatggattaacgagattcccactgtccctatctactatctagcgaaaccacagcctggggaacgggccaggcaaaatcagcggggaaagaagaccctgttgagcttgactctagtttgacattgtgaagagacatagagggtgtaggataagtgggagtatgtttcggcatacgccggtgaaataccactacctttatcgtttctttacttaatcaatgaagcggaattgggatttatttcccatattctagcgttaaagtttcttcgcgaactgatccgcgttgatgacattgtcaggtggggagtttggctggggcggcacatctgttaaaagataacgcaggtgtcctaagggggactcatcgagaacagaaatctcgagtagaataaaagggtaaaagtccccttgattttgattttcagtgtgaatacaaaccatgaaagtgtggcctatcgatcctttgttccctcgaaatttgaggacagaggtgccagaaaagttaccacagggataactggcttgtggcagccaagcgttcatagcgacgttgctttttgattcttcgatgtcggctcttcctatcataccgaagcagaattcggtaagcgttggattgttcacccactaatagggaacgtgagctgggtttagaccgtcgtgagacaggttagttttaccctactgatgaagtgtcgtcgcaatggtaattcaacttagtacgagaggaaccgttgattcagatcattggtatttgcggctgcctgacaaggcaatgccgcggagctatcatctgccggataacggctgaacgcctctaagccagaatccgtgccagaaagcgacgattttttggtccgcatgatttatatgtataaaaatagaggtaggacttgttcctactctcctgtatcgtagaagatgggcgatggttgatgaaacggaagtgttttattgacttgtccatgaaattccattgaaatcttgtgcggaatcgaatccattgcatacgactttaatgtggaacggggtattgtaagcagtagagtagccttgttgttacgatctgctgagattaagcctttgttcccaagatttgttccattaaggaaccatcatcttatttctttcatttttctcttcttgttggtaggcaaaaaattaaagacttgctaattcgaagagaaaaattggaggaaagaaagaaagaagagatgaagaagaagaagaagaagaaggaggagaggaggaagggggaagggggaagaagagggagagagaagaaaaagtcgagcgagtcgattttttttttcggtctgaactttttccctataatatatataaagagtatatagtatatttatacctttaaaatattttgaagagataaaaggtaagggtaatgcacttttgaagaaaaaataaattcaaagtccacacacgcagacaacttttttttgtagtagggggggtattagtagtagtagtagtagtagtattaggaattggtgggaaaatactcaatacccaatacccaattttgtggaaaagtaaaaactttttgaagggaaaagaggtaagggtaatgcacaaatcctagtaaaaaaaatattcaaccaaagttttttttttgtaggtagtagtagtagtaagtagttcataggtagtaggtaggtaggtatggtaggtagtagtacgtaggtaggtaagataagtggtaaggtaggtcgtgaatcgtaaaaaaaaaaaaaaaaaaaagaccttgaaaatgagttggtgagttggaattgtcaaaataggagagggatttaacgcagtgcaaggagctatcttggtggttcccccttttcaaatttcaagttccatttgtaaacaaatgcgcacaccacacacacacacacacacgctaaccattatttactgaggagaacatttttggacattggaaggagatatgaaagaagaattcattattgaagtttaacgtaatgtcatagattttaaaaagcttaagaatgaataacagttttacaaacaaaccaagcgtgttaaaataataaaagacggtaaagtaaaaaaaaagtacgtaaagtagtttagaacagtaaaaaaaaaaaaggaaaatgataaattagaataaagcagaaacaagataaacaaagttaaaagtacgttaaaagaacaatagcatatagttttaaaaaaaaaaaaaagaccaataagagaaaagaaaagaaaagaaaatagatataatagatatatattatgttttgtaatatttatttatgttttgtaatatttttaatgagggttacatttgtattgattattagggttggttacatggttacttgtgtgtgagagatagagagagagagtataaggttggtaaatgtggttaaaagtgtaaaaaaaaaaaaaaaaaaaaaaaaatttggttacaacaggttgggtttcctttttttttggtgtgtcatatttttcatggttacggttacattggatatggatatggtgataatgaggatatcatgatggaatggtggttactttaacacggatgaaaaagtacataatatatagtagtgtagtaacataaaaacagaaagttgtttccaaatgtggaaaatggacaaaattatcacgaggttaatttatttttaaaaatagtataaagtttgatggatggattgagagtaacaatatgtattttgtgaggaaacaacgggtggaaaagggatccaatgttgttatgtttttacttttgaaatctgtaactgtaatggtttttctttattatttatttattgttgtttttatttgtattcttaatgaacccactttttatttattatttttatttttatttttatttttttcaaacaacaaaagaaacatcgaaaatggctggtatagaaccccaaaatatcaccaaacatgacgtagaagaatgttcaatttcttgaccaaatatgtggaaaattttggtgcggttacatatgcacaatatccaacattttcaaaagaaacaaaaaaaaatttttttcatcaaaccacatttaggtcaggtatgcgtggctggatctggcaaaaagtaacgatgttacttgtctaagactgatgaagcgggtgtaaagatgagtctggtggtgaaatggagaaggctggaatgcaaaaacagtcattcgaaaggaaaattttcatctttacgaaattcgataggttctttatcacgtgttgaacacatcatgaggctcaagtgtttggttttgttctgtgaatttacaagaatgaaaaagatcgacaggcaaatgggtcaaaagttgaaaagtgaaagagggagtagaggtagttgtatggaggaagaaaatagataatttagaggaaatagatgagatgcatttcttttacaattttgagtaataaacatccatgtagctgaagccagagtgcaaaaaaaatgcatttagagtgtgttttccttggggaagggtggggcatgttatgggaaggtggagagaaaaaatgaaaaaaacaaggtaatttgtaggatttttacaaaataaataaatacattttatataatttaaccaaaagtaatgttttataatgaaaatgagcttggttgaccaactttgtaattttcgattttcatgacattcaagtatttacaaaataacataaacataatacactacacattcccaacatttttcaaaaacaaaatggaaaaaacaaaaaaagtgcaaacaaataaaagaaaaaataagaaaacaaaaaaacaactacaaaggtattgaaaatcgtgcgaaatatgggatggaacataaaaatgcaaatttttcgatacaaaacatgtgaggaaagcatgaaaaacaaaagaaaatggaaatgaaaaatttatgaaaaaataaagaaaaatttaatttataatttaacaaaacaatatttattgaaaagccaattttaatatgaaaaaaacggaatagagtaggtggagaggggtgggactttaaatttttcagggtcggtagagtcagagatgggtgtgggaaggggtagttgtaggtagggaatggagtatggttcaatggaaaatgagagaaataagaatcaatacaaataaaaaaaagaaaagaaagaaaagataaaataagaggaaaaaagggaaaagatacgaaagatgaaaaaagaaaaaaggggtttcaacaaacaaataaagaataaagagattttcgtatggtgtttttctttttcttttcgtttgtatttgaacgttgaataaggagaagtaaggagggagtagtgggattttgtgtggtggatagttttctggtggtagtagtaggacttttggtggagagaggagggatatggaagaaaggataggaaataggcaccgaaatggacgaaattcacacaaccacaaatgtttctataaaatcgaggaaaaataggtccaaggaactatgtaaaaggagtggtggttgaaaggagaaaagaaaaaagaagatgaaaagaaaaaaaaaaagaaaagaggaaaaagagtttttaatagcttttggaactttttatttatttttttttttggatttggaattttttttttcaactttcgtaaagacttgctaatctccttttgctaagaattgaaaaaatgggaaaatggaaattgttttaattcttctctttgtgttggcatcgcggtgcattggaaagaaagatagaattttactattttatttttgtttgctttgtaacggtctttgattgtccagaagaatgaaaagaaggtccgtcaagttttttcatacttttctttttcttattaaaaattacatttttagaaaaaaggttgaacgagaagaaggggaaaaagaagtggaaaaggagactttctctttggaaactttttttttgtttcatcttttttgtaaaatcggttttttaaaatttgtaatttcccccaaacccggtaccttgataccgcaaggataagttggaaagcgagttgcagttgtctacgtgacggtgcttgactccgactttttagctatcctttagcagatttgaaaggagagttgaaggattttttcttttctcttttcctgctggagaatccgcgcttcacgaatccattgcaaaatggaaagaggaagtcttgtggagactcgatgagttttttctgtggatgtatggtcattcgactaacatttgaactgaaaaagtcatttagtggtaacaacagatcaacagccgtagttttttttttattaaaaactatgtggtttgatttcgtttgaaccacttctgaagattttgattttcaactttgacatggagtacaattttatctatttatataatattttggaaacaatgtttatttgttggaatgctaaaatctgaggaaattatgataccaagctggcaatttccttgtcttcagagaaacgatatatccggtgttctttaaaagagaactaggaaatgttgttcatctctagacaacctcatataaaattaattttttaattgaggaataatgggaaattgtaaaaaaaaaatttaggaagaatttattttcttttctcttttttttttcagtttcacctttgagtaacttttgtttttgtttttttcttcctgattttgttgggaagaaaaaaaattaaaaacggtagtggtgtgtgaaaagtaaaaagaagttttaaaaaaaaacatttttttatcttcttcttttctgctttttgtctcacctctaacgatagttacctggttgatcctgccagtagtcatatgcttgtctcaaagattaagccatgcatgtctaagtataagcaattttgtactgtgaaactgcgaatggctcattaaatcagttatcgtttatttgatagtacctcaactacttggataaccgtggtaattctagagctaatacatgctaaaaatcccgacttttttggaagggatgtatttattagataaaaaaccaatgccttcgggctttttttggtgagtcataataacttttcgaatcgcatggccttgcgccggcgatggttcattcaaatttctgccctatcaactttcgatggtaggatagaggcctaccatggttttaacgggtaacggggaattagggttcgattccggagagggagcctgagaaacggctaccacatccaaggaaggcagcaggcgcgcaaattacccaatcccgacacggggaggtagtgacaagaaataacaatgcagggccctttcgggtcttgtaattggaatgagtacaatgtaaataccttaacgaggaacaattggagggcaagtctggtgccagcagccgcggtaattccagctccaatagcgtatattaaagttgttgcagttaaaaagctcgtagttgaactttgagcctggtcgactggtccgccgcaaggcgtgtttactggtcatgaccggggtcgttaaccttctggcaaactactcatgttctttattgagcgtggtagggaaccaggacttttaccttgaaaaaattagagtgttcaaagcaggcaagttttgctcgaatacattagcatggaataataaaataggacgtgtggttctattttgttggtttctaggaccgccgtaatgattaatagggatagtcgggggcattcgtattcaattgtcagaggtgaaattcttggatttattgaagacgaactactgcgaaagcatttgccaaggatgttttcattaatcaagaacgaaagttaggg

SEQ ID NO: 119 - DNA, 5802 bp, Sclerotinia sclerotiorum
atgtcgggacacccaccacaacaaggtggtcaatacgacgaaggctacggccatcaagcgggcaataccgattcttattaccaagatgagcacggagggcaacaatattatgacaataatggtggctacgaacagggccacgggggtcatcagcaagaaggtgctgaaggatattatgatgaatcaggctattacaatgctgatgccaacaatccatatcaacaagaaggagggtactacgaaggtggtgatcagcatcaaggccaatatcaagatgaatactacaacgaccagtactatgatcaggggggtgcagccggcggtgaggcaccccaagctaaacgtcgaggcgattcggaagaggattccgaaaccttcagcgactttaccatgagatcagacatggctcgagccaccgatatggattactatggacgcggtgacgagagatataacagctacaatgagagtcaaatgggtggtcgtggttacagaccaccatcttcgcaggtttcatatggtggtaatagatcctccggagcatcgacgccaaattacggcatggactacaacaacgtccttccacctggacagcgatctaaggagccgtatcctgcctggacctctgacgctcaaattcctctgtccaaagaagaagttgaggacattttcctggatttgacagccaagtttggtttccagcgtgacagcatgagaaacgtttacgatcatttgatgactctgctcgattcgagagcttcgcgcatgaccccgaatcaagcgctcctgtcactacacgcagactatatcggtggtgacaatgccaactaccgaaagtggtattttgctgctcatctcgatttagatgatgcggtgggattcgccagcatgaaacttggcaaaggagatcgtcgtactcgcaaagcccgcaaagcagccaaggcagcgccaccggaccctcaaaacgaggcgcaaacccttgagcaaatggagggtgataacagtctcgaagctgcggagtacagatggaagactcgtatgaaccgaatgtcccaacacgaccgagttcgtcaattggctctctaccttctctgttggggtgaggccaaccaggttcgattcatgcccgaagttctatgcttcattttcaaatgtgcagatgactacctcaactctcctgcctgccaaaacttggttgaaccagtggaagaattaacattcctcaacaacgttataacgcctctttaccaatactgtcgagatcaaggatatgaaattcaagacggcaagtatgttcgacgagaacgggatcataatgaaattatcgggtacgatgattgcaaccagttgttttggtatcccgagggtattgagaaaatcgtcctagaagataagtctcgcttggtggatctccctgttgcggaacgttatctcaaactcaaggatgtcaactggaacaagtcctttttcaaaacgtacctcgaaaaacgttcttggttccacatgttggtcaacttcaatcgcatttgggttatccacatcagtgccttctggttttttactgctaagaattcgccaacactcctggaaaagaattaccgacaacaggagaacaatcagcctcctgcctctgcgcagtggtccgcggttgctttgggtggtgcaattgcaagtcttattatggtcgtcgctacaatctgtgaatggtcctatgttcctcgtcgatgggcaggtgctcagcatttgaccaagaaactgttgttcctcatcgctgttctcattctcaatgtcgccccaagtgtgtacattttcatcattcccaacacacagaagacgaagcttgctttgattttgggcattgtccagttcttcatcgccctggtcacatacttcttcttctcgatcatgcctatgggaggattgttcggtagttacttgaccaggaactccagacagtacgttgctagtcagacctttactgccagctatcctcgtctgactggtaatgatatgtggatgtcttacggtctctggatcactgtcttcggagctaaacttgccgagtcctacgtcttcttgaccttgtccttccgtgatcctatcagatacttggacagcatggaaatctcttactgtgctggtgatgctctgtttggcgatgttctctgtaaattacagcccaagattctcctcggtctcatgttcgtcaccgatcttacgttgttcttcttggatactttcatgtggtatattatcatgaacgccatttactcggtcgctcgatccttctaccttggtgtttccatctggacaccatggagaaatatcttctcgcgtttgccaaagcgtatctattccaaggttctcgccacgactgatatggaaatcaagtacaagccaaaggtcctcatctctcagatctggaacgctattgtcatttccatgtacagggagcatctccttgctatcgaccacgtccaaaagcttctctaccatcaagttccttccgaacaagaaggcaaaagaactctccgagcgccaactttcttcgtctcgcaggaagatcactctttcaagaccgaatttttcccaaaccagagtgaggccgagcgtcgtatctctttcttcgctcaatctttgtcaactcctattccggaaccacttccagtcgataacatgccaactttcactgtcatgattccgcattacggagagaagattttgttctccctgcgtgaaatcattcgtgaagatgagccatactcccgcgttactatgcttgagtacttgaagcaattgcaccctcacgagtgggattgcttcgtaaaggatactaaaattcttgcagatgagacctcacaatttaatggcgattacgaaaaggatgagaagaatactgccaagagcaagattgatgatcttcctttctattgcataggtttcaagtcggccgctcccgagtacactctccgcacacgtatttgggcttctttgagagcacaaaccctttaccgcacaatctctggtttcatgaattatagtcgtgctatcaaactcctctatcgtgttgaaaatcccgaagtcgttcaaatgtttggtggcaactcggacaagcttgaacgcgagcttgagcgtatggcccgtcgcaagtttaagctatgtgtttctatgcaacgttatgccaaattcaagaaagaggagatggaaaacaccgaatttcttctccgtgcctaccctgatctccaaattgcttacctggatgaagaagctcctctcgccgaaggggaagagccacgtctttactccgctctcattgatggtcactccgaacttatggaaaatggaatgcgcagacccaagttccgcattcaactttccggtaacccaattcttggtgatggaaaatctgacaaccaaaaccatgccatcatcttttaccgcggcgagtacattcaacttattgatgccaatcaagacaactatttagaagaatgcttgaagattcgaagtgttttggccgagttcgaggaaatgacaactgaaaacgtctctccttacactcctggtgtctccaaccccaaggtcgccccggttgccattctcggtgctcgtgaatatattttctctgagaatattggtattttgggagatgtcgctgccggaaaggaacaaacattcggtacgctcttcgcacgtacgcttgctgccattggtggtaagcttcattatggacatcctgatttcctgaacggtatcttcatgactacgagaggtggtgtttccaaggctcagaagggtcttcatcttaacgaggatatttatgctggtatgactgcacttcttcgtggaggtcgcatcaagcattgcgagtactaccagtgtggtaaaggtcgtgatctgggttttggctcgattcttaacttcaccacaaagattggaactggtatgggtgagcaaatgctttcgcgtgagtattattatctcggtactcaacttcctattgatcgcttcttgtccttctactatgcccatcctggtttccatttgaacaatatgttcatcatgttgtccgtcaacttgttcatgctctgcttgatcaacttaggagccctcagaaaccaggtcatcgagtgtaaatataacgtcaacgtccctattaccgatccactctatccaactggttgtgcaaacatcattcccattatgaattgggtttatcgttgcattatctccatcttcatcgtgttcttcatctctttcgtacccttgacattacaggaattgacagagcgtggtttctggcgtgcggctacccgtctcggaaagcaattcagttctttgtcgcctttcttcgaagttttcgtctgtcaaatttatgcgaacgctgttcagcaagatctttcgttcggtggtgcccgatacatcggaacgggtcgtggtttcgctactgcccgcattcccttcggtattctcttctctcgattcgccggtccctcgatctatctcggagctagattacttatgatgttgttattcgcaaccatcactgtctggcaagctgcgttggtatacttctgggttactctccttgctttgtgcatttctccattcttgtataatcctcatcaatttgcctggaacgatttcttcattgactacagagactacctcaggtggttgtctcgcggaaattcgcgttctcacgcatcgagttggattgcttactgccgtctctctcgtactagaattacaggttataaacgcaagattcttggagacccatctgccaagatgtctggcgacactgcccgtgcctcattctccaatctcttctttggagaaatcgtgggaccgctcatggtcgttgctctcaccttgattccatatctctacataaatgcccagactggtgtcattccaagcatcaacgataacgtcgaaactaaagcgacgaacgccttgattcgtgttggtattgtagccttggctcctattgcagtcaacgcaggtgtcctggctgtcatgtttagtatggcttgttgtatgggacctctccttggcatgtgttgcaagaaattcggatccgttctcgccgcaattgcacatgccctggccgtcgtcttctgcctggttttcttcgaagtcatgttcttcttggaaggatttgacttcgccaagactctgttgggaatgattgcgtccgccgccattcagagatttgtctacaagctcatcatcagtctagcactgaccagagaattgaagaccgacacatccaatatagctttctggactggtaaatggtattccatgggttggcacacgatttcccaacctggtcgtgaatttctttgtaagatcaccgagcttggaatgtttgctggggactttgttcttggtcatctccttctcttcatcatgcttcccgtcatcgccatacctcaaattgacaagcttcattctgtgatgctcttctggcttcgtcccagtcgacaaattcgtcctccaatctactccttaaagcaatccaagttacgaaagaaacgtgtctggcggtacgcctgtgtatatttcgctctgtttgtcgtcttcctcgcactgcttgtgggcccacttgttgttggcaagaagatcttgacccctagcttgataagtaagattccacagaagctcttccagcctatcaaccagaacaacaacgacacaagaggttacaaccagaccggtactggttgcgtgacatgctccacagcctctgccacttcaaccaaaactgctgctgctaagattcgattgttctaa

SEQ ID NO: 120 - DNA, 6207 bp, Talaromyces stipitatus
atgtctggccattacgacgatggttacggccatcaaggccatggtggtgatgcctattaccatgacgatcagcatgggtactacgatcaaaacgagtactcgaattacggagacggctactacgaccagagtggctactacggcgagcacaacggtgaaggtcacggcgagcacaacgctgaaggtcacagcgagcacaatgcaggaggcggcggctattatgaaggtggtcaagacaactactacaatgatcagtactacgatcaaggccatggtggacatcctgactacgcacagaacggccgcggtcgtcgacgtggcgattctgaagaggactcggaaagttttagtgatttcaccatgagatccgagacagcgcgtgccgccgacatggactactacggtcgcggcgatgaacgctacaatagctacaacgaaagccagatgggtggtcaaggatatggaaactaccgcccaccgtcttctcagatctcctacggtggaaaccgctcatcgggcgcctcaaccccggtttatggcatggactataccaacgctctccccgccggtcagcgttctcgcgagccgtacccagcttggacttcggatgctcagatccccctttccaaggaggagattgaggacatcttcattgacctcgtcaacaagtttggtttccaacgcgacagcatgcggaacatgtacgaccatttcatgactcttctcgattctcgtgcgtctcgcatgacccccaatcaggcacttctctcgttacatgcagactatattggtggtgacaatgccaactaccgccgttggtacttcgcagctcatctcgaccttgatgatgccgtgggattcgccaatatgcagcttggaaaagccaatcgtagaacccgaaaggcccgtaaagcggccaagaaggctgctgagcagaatcccgagaatgaacaagcaacgcttgatgcgttggagggcgacaatagcttggaagctgccgagttccgctggaagacacgtatgaaccgcatgtctcaacatgaacgttgccgacagatcgccctctatctgctttgctggggtgaggccaatcaagtacgattcacgcccgagtgtctctgcttcatcttcaagtgtgctgatgactacttgaactcccccgcatgccaaaatcgtgtcgagcccgttgaagaaggaacatatctcaacaatgccatcactcctctgtatagctatctgcgtgatcagggttatgagatttacgatggtaaatatgttcgtcgtgagcgtgatcatagccagattattggctacgacgatgtcaaccagctcttctggtaccctgaaggtatcgagcgcatcatcctggaagacaagacgcggcttgtggatattccgcccgcagagcgatgggaaaagctgaaggacgtcaactggaagaaagtatttttcaagacttatcgtgagacccgttcctggttccacatgattactaacttcaatcgaatctgggttattcacttgggtgctttctggtttttcactgccttcaatgccaagtcgctgtacaccaaaaattatcagcaacaactcaacaatcagcctcctggctcttattcgtggtcagcagttgccctgggtggcacactctcttctctcatcaacattgttgcaaccatttgcgagtgggcttacgttccacgtaaatgggccggtgcccagcacttgaccaagcgtcttatgtttctgctcgcagtcttcgccgttaacattggacctgctatctatgtctttggtgtatcgaaagatggcacagacactattgcattggccctcggtatcgtacagttcttcatcgctttggcaacgttcttcttctttgcggtcatgccacttggtggtttgtttggcagctacatgaaaaacaatacacgccagtacgttgccagtcagaccttcacagccagctttcctcaactcagtggtaatggtatgtggatgtcttatggcatgtgggtttgcgtgttcgccgccaaattggtcgaatcatacttcttcctcacactctccttcaaggaccccatccgtatccttcgcccgatgaagatcgagcactgtttgggtgataagatcatcaaagaatatctgtgccatgctcaacctcaaatccttcttggtttgatgttcttcacggacttgactcttttcttcctggatagctatttgtggtacatcatcttgaatacaatcttctcagtggcgcgatcgttccatctgggtgtgtctatctggagtccttggcgaaacatcttctctcggttgcccaagcgtatctactccaaggttctcgctaccacggatatggaaatcaagtataagccgaaggtcctgatctctcaggtctggaacgccattgtcatttccatgtaccgtgaacatctcctcgccattgaccatgttcagaagcttctctatcatcaagttccttcggagcaggaaggcaagcggactttgagagcgcccacattcttcgtctctcaggaggatcattcattcaaaaccgaatttttcccctctcagagtgaagcggagcgtcgcatttcgttctttgcccagtcgctttcaacccccattcctgaaccacttcccgtcgacaacatgccaactttcaccgttttgattcctcattacagcgaaaagattctcctttccctgcgagagatcattagggaagacgaaccttactctcgtgtcactcttctggaatacttgaagcagctccacccacatgagtgggactgttttgtgaaggacaccaagattcttgcagatgaaacctctcaattcaatggcgagtatgagaaatccgagaaggatgcagcacgaaacaagatcgacgacctccctttctactgcattggtttcaagtctgctgctcccgaatacactctgcgcactcgtatctgggcatctcttcgtactcaaaccctctaccgtacaatctccggtttcatgaactacagtcgtgccatcaagctcctttatcgggttgagaaccccgaagttgtccaaatgtttggcggcaactcggataaattggaacgtgaattggagagaatggcgcgccggaagttcaagatctgtgtctctatgcaacgttacgccaagttcaacaaggaagagcgtgaaaacaccgaattccttctccgtgcttaccccgacctccagatcgcttaccttgatgaagaaccaccggctaacgagggtgaggagccaagactctactctgctcttattgatggacactcggagattttagagaacggtcttcggaagcccaagttccgcattcagctctctggcaaccccattctaggagacgggaagtccgacaaccagaaccactccatcatcttctatcgtggtgaatacattcagttgattgatgccaaccaggacaactacctcgaggaatgtttgaaaatccgcagcgttcttgccgagtttgaggaattgactacggacaatgtctctccgtatacgccaggtgtacctactcctaagactgatcctgttgctattcttggtgctcgtgaatacattttctccgagaacattggtatccttggtgatgtcgctgccggaaaggaacagacgttcggtactctattcgctcgtactcttgccgaaattggtggtaaacttcactacggtcatcctgatttcctcaacggtattttcatgaccactcgcggtggtgtctctaaggctcagaaaggtctccatttgaacgaggatatctacgctggtatgaatgctgtcctccgtggtggaagaatcaagcactgtgaatacttccaatgtggcaaaggtcgtgatcaaggttttggatccattctcaactttacgactaagattggtactggtatgggtgagcagatgctgtctcgtgaatactactacctcggcacccaacttccattggatcgtttcttgtccttttactatgctcaccctggtttccacgtcaacaacatgttcattatgttgtctgtgaacatgttcatgattaccatggttaatcttggtgcccttcgtcacgaaaccatcctttgccgattcaattccaaccttccaatcaccgatcctctcatgcctactggttgcgctaaccttgtacctatcactaactgggtcaaccgttgtattgtgtctatcttcattgtgttcttcatttccttcgtgccattggtggttcaagaattgactgagcgaggtgtttggcgtgcagcaactcgtcttgccaaacagtttggttctctttcgttcatgttcgaggtgttcgtttgtcaaatctatgcaaatgccattcagcaagatctctcctatggaggtgccagatacatcggtaccggtcgtggttttgcaactgcccgtatccccttcggtgttctctactctcgtttcgctggaccctcgatctacctcggcgccagatgtttgctcatgttgctcttcgccacgacaaccatgtggactgctgctttgatctggttctgggtttccttgacggctctttgtatctcaccgtttttgttcaatcctcaccagttctcatggaatgatttcttcattgactatcgtgactatcttcgttggctgtcgcgtggcaattccagatcccacaactcttcatggattgccttctgccgcctttctcgtaccaggatcactggatataaacgcaaggtcctcggtgtgccatcggagaagctgtcaggcgatgtccctcgcgcgcgtattaccaacatcttcttttccgaaatcctaggccctttggtcttggtcgcagtcacaataattccttatctctacataaacgctcgtactggtgtcacggacagcggcgcaacgcccaccaacgcgcttatccgtatcgctatagtcgcctttgctcctatcggtgtcaatgctggcgttgctggcgccatgttcggtatggcctgctgtatgggtcctgttttcagcatgtgttgcaagaagttcggttctgtgcttgcagctatcgctcacggtgtcgctgtcattatgctcctcgctatattcgaagtcatgttcttcttggaaggctggagtttccctcgttgcgtcttgggcatgatttccatggcagccatccagcgattcgtctataaactgatcattgctctcacattgaccagagaattcaaacatgaccaatccaacattgcttggtggaccggaaagtggtacaacatgggatggcactctctctcccagcccggccgtgaattcctctgtaagatcaccgagcttggttactttgccggcgacttcgtcttgggtcatcttctccttttcgccatgcttcccgctctctgcgtgccatacattgacaaattccattcggtcattctcttctggcttcgtcctagccgacaaattcgccctcctatctactctttgaagcagtctaagctccgtcggcgtcgtgtgatccgctacgccatcctttacttcaccatgcttattctgtttattgtcctcgttgtcgcgcctttggtcgttcgccgcatgaacattaagcttccctcaatcccacaggaccttatgcagccattggatgctggagacgcccataacgacacccatacatactataccggatctggtctaccggccggttttatcgcgcattctggtactgacagcggcagcaagagcaccagcactgccggcgcgaagatgatgttcatgttctagactgcatactgattttgattatctatttttacttttatcttcacatctcggatgctgtacaaatgcctgaagatccaggaaaatggctcagttcgggcattctttcttacgactgcatcgcccgcactcatttcactcatcacctcttttattgctagtaatgagtaattacatctcctgtgcttttactgtatacgtttatggagttgattggctgttgtttcgtcgaacctatatgtctcttaaaacctgccactttcgtttctcatgcgattatgctttttttatacttctacaaacgcactatctgacgatagcctttttgtatcatcaaatgcaattctctggttttgttccatatttcttcatcaacatatgcgttgtcttctgtatggagcataaattatactgccccttaggttt

SEQ ID NO: 121 - DNA, 5700 bp, Vanderwaltozyma polyspora
atgtcatacaacaacaataatatggacaatatgggtaatccagatggtcatcctcaagatatgaacggtatgggttatcctcaaaatgatcaagattaccaaggtcaagcttacgatgattatggtcaaccgatttatcctgatcaaatgcatcctcaagatgaatattatgatccaaatgctatgaatgatccatattcccaaaatccaaatggtcaaggttattatcaacaaccttacgaaaatcaaaatgctggtcaaggctatccaggcgatcagtattatgatcaacctcaaatgcaccaagatccagaaaatttctcagattttagttcatacggtcctccagctactccaggctacgataactatggtaacatgggtcaatatactccatcacaagttagttatggtgatccaaactcatcgggcacttcaacaccaatttacggtggcatgaattatgatccaaatgctatcgcaatgactttaccaaatgatccataccctgcctggacagctgataatcaatctcctgtctctatagaacaaatcgaagatgtcttcatagatttaacaaatagatttggtttccaaagagattccatgagaaatatgttcgatcatttcatgactctattagattcaagatcttcaagaatgtccccagaccaagctttattatcgttacactctgattatatcggtggtgatactgccaattataaaaaatggtattttgccgctcaattagatttagatgatgaagttggttttagaaatatgaacttgagtaaagttaaaaagaagagaagattaatgagaaagaaaaataagaaggctctggaagagacagcagaagacacagaagctactctaaaccaattagaaggtgacacctccttagaagctgctgattataggtggaaggctaaaatgaatcaattatctcctctagaaagagttcgtcatatcgctttgtacttactatgttggggtgaagctaatcaagttagattcacttcagaatgtttgtgtttcatctataagtgtgctttagactatttggattccccattatgtcagcaacgtactgagccaatgccagagggtgattacttaaacagaattatcactccattataccgtttcttaagaaatcaagtatacgagatcgttgacaaccgttatgtaaagcgtgaaaaggatcacaacaaaattattggttacgatgatgttaaccaattattctggtaccctgaaggtatctctaagatcgttttagaagattcaactaagttaatcgaaattccaatcgaagaacgttatttgagattaggtgatgttacttgggatgacgttttcttcaagactttcaaagaaactagatcctggttacacatggtaacaaactttaacagaatttggattatccatgctaccgtctattggatgtataccgcttacaacgctccttctttctatactaagaattatcaacaattagtggacaaccaacctttagctgcttatagatgggcaagtgctgctttaggtggtactttggcttgtgctctacaaattgctgcaaccgtctgtgaatggctatttgttccaagaaactgggccggtgctcaacatctatctcgtcgtttttggtttttgtgtggttgtttaggtgtaaacttaggtccattgattttcgtatttgcttacgataaagattacgtttattctacagctgctcatgctgtcgctgccgttactttcttcatcgctgttggtaccttgatattcttttccatcatgccattaggtgggctattcacttcatacatgaataagacttccagacgttacgttgcctctcaaacctttaccgcaaactttgctccattgcacggtatcgatatgtggttatcttacttggtttgggttactgttttcgctgctaaattctccgaatcttatttcttcttgactctatctttaagagatccaattagaattttatctaccacaacaatgagatgtaccggtgaattctggtggggtgatgtcatgtgtaagcaacaaccaaagattgttttaggtttaatgattgctaccgatttcttattattcttcttagatacctacttatggtatgttttggtcaacgttatcttctctgtcggtaagtccttctacatgggtatttctattttgacaccttggagaaacatctttactagattaccaaagagaatttattctaagattttggctactactgatatggaaatcaaatacaaaccaaaggttttgatctctcaagtctggaatgctattgttatctctatgtacagagaacacttgttagctattgatcatgttcaaaagttgttatatcatcaagttccatctgaaattgaaggtaagagaactttaagagctccaactttctttgtttcacaagatgacaacaattttgaaactgaatttttcccaagaaattccgaagctgaacgtcgtatttccttctttgctcaatcattggctactcctatcccagaaccattgccagttgacaacatgccaacatttactgtcttaactcctcattatgctgaaagaattctattgtctcttagagaaattattcgtgaagatgatcaattttcaagagttactctattagaatacttgaaacaattgcacccagttgaatgggaatgttttgttaaggataccaaaattttagctgaagaaactgctgcttacgacggcaatgatgaagaccctgaaaaagcaaatgcattgaaatcccaaatcgatgacttgcctttctattgtattggtttcaaatccgctgctcctgaatatactttacgtactcgtatctgggcttctttaagatcccaaactttgtatcgtactgtttctggttttatgaattattcaagagctattaaactgttataccgtgttgaaaatcctgagattgttcaaatgttcggtggtaacgctgaaggtttagaaagggaattggaaaaaatggcaagaagaaagttcaagtttttggtttctatgcaaagattggctaagtttaaaccacacgaattggaaaatgctgaatttttgttgagagcttatcctgatttacaaattgcgtacttggatgaagaacctcctctacaagaaggtgatgaaccaagaatttactctgctttaattgatggtcactgtgaaattttggaaaatggccgtagacgtcctaaattcagagttcaattatctggtaatccaattttaggtgatggtaaatctgataaccaaaatcatgctttgattttctacagaggtgaatatatccaattgattgatgctaaccaagataactatctagaagaatgtttgaagattagatctgttttggctgaatttgaagaattaagtgttgaacaaattaatccatacgctccaggtttgaaatatgaagaacaaaacaacaaccacccagttgctattgtcggtgctagagaatatattttctccgaaaattctggtgttttaggtgatattgctgctggtaaggaacaaacatttggtactctgtttgctcgtacgttatctcaaattggtggtaaattacattatggtcaccctgattttgttaatggtttattcatgacaacaagaggtggtgtttccaaggctcaaaaaggtttacatttgaacgaagatatttacgctggtatgaatgctatgttacgtggtggtcgtattaagcactgtgaatattatcaatgtggtaaaggtagagatttaggtttcggtacaattttgaatttcacaactaagattggtgctggtatgggtgaacaaatgttatcccgtgaatattactacttaggtacacaattaccaattgaccgtttcctatctttctactatgctcaccctggtttccatttgaacaacttgtttattcaattgtccttacaattatttatgttaacccttgttaacttaaatgcattggctcacgaatctattctatgtttctataacagaaatactccaatcactgatgttctatatccatggggttgttacaacttcgcccctgccattgattgggtcagacgttatactttgtccatcttcattgtgttctggattgcttttattcctatcgttatccaagaattgattgaacgtggtgtgtggaaagctactgttagattcttccgtcatatcctttctttgtctccaatgtttgaagttttcgccggtcaaatatattctgcagcattattaagtgatttaactgttggtggtgctcgttatatttcaactggtcgtggtttcgcaactgctcgtattccattttcaattttatactctagatttgctggttcagcaatttatatgggtgctagatcattgtttatgttattattcagtacaattgctcattggcaggcaccattgttatggttctgggcttccttaagttctttaatgttttctccatttgtctttaatcctcatcaattctcttgggaagatttcttcttagactacagagatttcattagatggttgaccagaggtaacaataagtaccacagaaactcttggattggttatgttagaatgtcaagatctcgtgttactggtttcaaacgtaagttgattggagatgagtctgagaaggctgttggtgatgccagcagagctcacagaaccaatgtcatcatggctgaaattttcccatgtgctgtatatgctgctggttgttttgttgcgttcacatttatcaatgcacaaactggtgttaaccaaactgataatactgatcctactgtaaactcctgtttacgtatcattatctgtactttggctccaattgctattaacctaggtgttctattcttctgtttgggtatgtcatgttgttctggtccattatttggtatgtgttgtaagaagactggttctgttatggctggtattgctcacggtgttgctgtgattatccatcttgctttcttcattgttatgtgggttttcgaaggtttcaattttacaagaggtttgctaggtactatcacatgtattcaatgtcaaagattggttttccaatgtatgactgttttaatgttgactcgtgaattcaagaacgatcactccaacactgccttctggactggtaaatggtatggttctggtatgggtatttctgcatggacacagccaagtagagaattaactgctaaagtcattgaaatgtcagaatttgcagctgatttcattttgggtcatattttgttattctgccaattaccaatcttatgtatcccacgtattgacagtttccactcaatgatgttattttggttgaaaccatctcgtcaaatccgcccaccaatttattcattgaagcaaacccgtctgcgtaagcgtatggttaagaaatacattagtttgtatttctgtgttctagctggttttgctgcctgtattattggcccagctgtcgcatctagtcatgtttctgataaattaggtagtggtttaaccggtgtagctcacaacttattccaacctagaaatcaaagcaacaatgacactggtccaagtttctcaacattcagccgtgcatcagattatacatccgctccaaagttgaagacttggtctacaatcaaatag

SEQ ID NO: 122 - DNA, 6106 bp, Cyberlindnera mrakii
  misc_feature (154)..(154): n is a, c, g, or t
acagtacacacggtatctaccgccattgggattgtcaggaaccgccgtttttgtttgttttctggctctcgctttacgtctcgcctcatcttgatttgatctctcgtgtcttaggaggttggaacaaggaagaatactcttgaaggaagagcgnctagggtgactgatttttctatctactgctgctattattaccttattctccttgtctgaaacaaagagatttgcttcgcaaaagaactctgttgctcatcctttttctttctacgtcttgagcatacgtaccttctcttgtgcttttgttcaaatcgtttcaaacttgatccgctctttgcttgattcgtttatacacaggggtttgccttgatcatgtcacagaacaatcaatattacgacaaccagggccagggccaaggtcagggccaaggtcagggccaatacggccagaaccagtacgatcagtacaatgaccagtatcagtacgaaggggccaaccaccaggacccatattacggtaacgaaggataccatgcttcacaggaaggtttgaaccaaggtgagtattatgacccacagaacgatggcgcctattatgcccaaggttatgaacacgaccagggttacccacagggatatgatcagggttacaaccaaggttattatgaccaaccaagaggtgttgcagacaacgatggtaacttttcagacttttcttacggtggcccaaatcctccagctactccaggctatgattatggtacccaatacacgccatcacagatgagttatgctggtcaaagatcttcgggtgcatctactccaatctatggttcccagggtgcctttgatccatctcaagttgcggttgctttgccaaacgaaccgtacccagcttggaccgctgatcaacaggctccagtttccattgaacagattgaggatgtgtttatcgacttgacgaacagattcggtttccagagagactccatgagaaacatgttcgatcattttatgacattgttggattctagatcttcgagaatgtctccagctcaggcgttgttgtccctgcatgccgattatattggtggtgataccgctaactacaagaagtggtattttgctgcccaattggacctcgatgatgatgtcggtttcagaaatatgaacttgggtaagctttcaagaaaggctagaaaggccaagaagaaatccaagaaaacaaagaaggctgttgaagaagccggtgctgaaaatacagaggaagccttgaatgccctcgaaggtgataactcccttgaagctgctgattataggtggaaggccaagatgaacaaactcagtcctctggaacgtgtccgtcaaattgctctgtacttgctctgttggggtgaggctaaccaagtcagattcactccagagtgtttgtgtttcatctacaagactgcattggattacttggactctccagcttgtcagcaacgtgttgaaccagtgccggaaggtgactatctgaacagagttatcactcctttgtaccgtttcattagatcccaagtctacgagattgttgatggtcgttacgtcaagcgtgaacgtgaccataataaggttattggttatgatgatgttaaccaattgttctggtacccagaaggtatcgccaagatcgtgtttgaagatggttcaagattggtcgatttggcatcagaggaccgttacgtcagattgggtgagatcgcttgggatatggtgttcttcaagacctacaaggagattagaacctggatgcatttggttaccaacttcaatcgtatctgggttatccacggttccttcttctggttttatatggcatacaactccccaacgctgtacacttctaactaccaacagttggtgaataaccaaccccttgcagcttacagatgggcttctgcggccttggctggttcttttgctactgctattcaaatctttgccactatttgtgaatggttttttgtcccaagaagatgggctggcgctcaacacttgtctcgccgcttctggttcttgatcatcatctttgccgttaacctgggtccaattgtctttgtgttcgcatatgatccattgacagtgtactctagagctgctcttgttgtttctatagtgatgttctttgtcgccgttgccactgtcgtattcttctctgtcatgccattaggtgggttgttcacttcttacatgaaaggaaataatagaaagtatgtcgcttctcagactttcaccgcctctttcgcgccattgagaggtcttgacatgtggatgtcctatttgttgtgggccaccgtctttggtgccaagctatccgagtcttactggttcttgattttgactttgagagatcctatcagagtcctgtccacaacaaccatgagatgtactggtgaatactggtggggtaacgtattgtgtcaacaacaggcccgtatcaccttgggtttgatgtacttcaatgatttgatcttgttctttttagatacttacctttggtacattgtctgtaactgtgtcttctcggttggtcgttcattctaccttggtatttctattttgactccatggagaaacatctttaccagattgccaaagagaatttactcaaagattttggcaaccactgacatggagatcaagtacaagccaaaagttttgatctctcaagtttggaacgctattgtcatttccatgtacagagaacatttgcttgctattgaccatgttcaaaagctgttgtaccaccaagtcccatctgaaattgaaggtaagagaacccttagagctccaacttttttcgtgtctcaagatgacaacaactttgacacggagtttttcccaagagattccgaagctgaacgtcgtatctccttctttgctcagtctttggctactccaatccctgagccattgccagttgacaacatgccaactttcactgttttgactcctcattactccgaaaagattctattgtctttgagagagattattagagaggacgaccaattctctcgtgttacattgttggagtacttgaaacaattgcacccagttgaatgggactgtttcgtcaaggacaccaagatcttggctgaagagactgctgcttacgagaacaacggtgaagaggagaaagatgagaatggtttgaagtccaaaatcgatgatttgccattctactgtatcggtttcaagtccgctgccccagaatacactttgcgtacccgtatctgggcttctttgagatcccaaaccttgtaccgtaccgtgtctggtttcatgaactatgctcgtgctatcaagctgttgtacagagttgagaaccctgagattgtccaaatgttcggtggtaacgccgaaggcttggagagagagttggaaaagatggctagaagaaagttcaaattcgttgtctccatgcaaagattgacgaagttcaagccggaagaattggaaaatgctgagttcttgttgagagcttacccagatttgcaaattgcctacttggacgaagaacctcctcttaatgagggtgaggagcctagaatctattctgctttgatggacggtcattgtgagattttggagaacggtcgtcgtagaccgaagttcagagttcaattgtccggtaacccaatcttgggtgatggtaagtctgataatcagaaccatgctttgattttctaccgtggtgagtacatccagttgatcgatgctaaccaagataactacttggaggagtgtttgaagatcagatctgttttggctgaatttgaggagttgaatgttgcacaagtcaacccatacgcaccaggtttgaggtttgaagagcagaacaagaaccacccagttgctattgttggtgccagagaatacattttctctgagaactctggtgttcttggtgatgttgctgctggtaaggaacaaacgtttggtacattgtttgccagaacgttgtcacaaattggtggtaagctccattatggtcatcctgatttcatcaatgctgctttcatgactaccagaggtggtgtctctaaggcccaaaagggtcttcatttgaacgaagatatctacgctggtatgacagccttgtgtcgtggtggtcgtatcaaacattctgaatatttccaatgtggtaagggtagagatttgggtttcggttctattttgaactttaccactaagatcggtgctggtatgggtgagcagatgctctctcgtgaatactactacctgggtactcaactaccgttggatagattcctgtctttcttctatgctcacgcaggtttccacatcaacaacttgtttattcaattgtctttacaagctttctgtttgaccttgatcaacttgaacgctttggcacacgaatccatcttctgtatttacgacagaaacaagccaattaccgatgtcttaaaaccaactggttgttataacttttctcctgtggttgattgggtgagacgttacactttgtccattttcattgtcttcttcatctctttcattccaattattgttcaggagttgatagagcgtggtgtctggaaagctactcagagattctgccgccatttactatcgttatctcctgtgttcgaggtgtttgttggccagatttactcttcttctttgattaccgatatggctgttggtggtgctcgttacatttccactggttcgtggatttgctactgccgtattccattctctgtgttgtactcgagatttgcggactctgctatctacatgggtgcgagatgtatgttgatgatcttattcggtactgttgcttattggcaaccagctcttttgtggttctgggcttctttatcttctttgattttcgctccatttctctttaacccacatcagtttgcctgggatgatttcttcattgattacagagatttcatcagatggctgaccaggggtaacaacaagtggcatagaaattcctggattggttacgtcagaatgtcgagatctcgtattactggtttcaagagaaaaattttgggtgtcgagtccgagaaggctgcgggtgatgctactagagctcaccgttccaacattgcctttactgatgttattccaactgttatctttgctgccggtgcctttgttgcgttcactttcattaacgctcaaactggtgttaaagatgccgagacggtgaattctgtactccgtgtcattatctgtacacttgctccaattgctattgacttgggtgtcttgttcttctgtcttggtatggcttgttgtgctggaccaatgcttggtatgtgctgtaagaagactggttctgtcatggctggttttgcccacggtgtcgctgtcattgtccacttggtcttcttcattgttatgtgggttcttgaaggtttcagttttgtgagaatgttgcttggtgttgttactatgatctactgtcaaagagttatcttcaagattatgactttgctcttgctgacccgtgagttcaagaacgacaatgccaacgttgccttctggacgggtaagtggtacggtaagggtatgggatgggctgcttttactcaaccatctagagaactggctgccaaggttatcgagctttctgagtttgctggtgatttcattttgggtcacatcatcttgttcttccaattcccacttgtgtgcattccattcattgatagatggcattctgtgatgttgttctggctgaaaccatccagacagatccgtccaccaatctattctttgaagcaagcaaagccgagaagacgtatgatcagaaagtacttgtcgttgtacatcctgatcttaattatcttcattgcttgtatcgctggcccagctgctgcttccagtcatgttccaaaggacttgggttcttccttgactggtgtctttgcaaacttggttcaaccaagaggcttgagcaacgacgatactggctcatcattctcctccctttcacattactacacttctactccatctttgagcacttggtctaccaaggcttaagaggtttctcattgtatcataggaaactttt

SEQ ID NO: 123 - DNA, 5805 bp, Yarrowia lipolytica
atgtcatacgactacaactacgactaccagcaaccgggccagcagggcggtgacggccagcacaacggccagaaccagcagcaccccggtcagcaggaatattatgacgactactacgacgacggatacggcaaccagtacggtgcccaggagggctaccaggagggtgtggaccagcacggcaacccctaccagcacgacccccacgccggtgtcgccgccgctacctctggcggctaccgaaacgtgaaggacgacggctctgagaccttctctgacttcaccgaacagaatggccagggttacaaccagtacaaccagggttacaaccagggccagtacaaccagggctaccagggccagtacaaccagggctacggtggctacgaccagtatggccagtacaacgacgcttcccagatttccttccggtcgtctggcgcttccacccccatctacggcctcgactacgctgcttcccagcagggcattggcgccggctccggacactcccgagagccctaccctgcctggtctgccgacaaccaggtccctgtgaccaaggaggagattgaggatgtcttcatcgacctcaccaacaaatttggtttccagcgagactccatgcgaaacatgtacgacttcctcatggttctgctcgactctcgatcgtctcgaatgacccccaaccaggctctgctctctctgcacgccgactacattggaggtgacaacgccaactaccgaaagtggtactttgctgctcagttggatctcgacgacgacattggattccgaaacatgaagctcggaaagaccaacaagcgaacccgaaaggctcgaaagaagttccgaaaggagatgcaggaccctgacgctgatcctgccaagactctggaggagattgagggtgacaactccctcgaggctgccgagtaccgatggaagaccaagatgaacgctctgtctcctctggagcgagtgcgacacattgctctttggctgctctgttggggtgaggccaaccaggttcgattcacccccgagtgcctctgtttcatcttcaagtgtgccgacgactactacacctccgccgagtgccagcagcgagttgagcccgttgaggagggtgactaccttaaccgaattatcacccctctctaccggttcatccgaggccagggttacgagattttcgacggtaagtttgtcaagcgagagcgagaccacaacaaggtcattggttacgatgatgtcaaccagctcttctggtaccccgaaggtattgagcgaatcaccttcgaggacgagtctcgactcgttgacgtgcctcagtccgagcgatacatgaaactcggtgacgttatctgggacaaggtcttcttcaagacatacaaggagacccgatcctggttccacgtgttcgtcaacttcaaccgaatctggattatccacgtcaccttctactggtactacgcctccttcaactctcccactctctacatgaagaactacgtccccactcttgacaaccatcctcctcctgcctgtaagtggggagctggtgccattggtggtgtgattgccaccggtctgcagattatcgctactctttccgagtgggcctttgtgcctcgaaagtgggccggtgctcagcatcttactcgacgtctcatgtttttgattggtatcctcattgtcaacctggttgctccggtttacgtccttggtgtggttggtaccacccatgagtcgacctctgctctggctgttggtattgttggattcatcatctcgatcttcacctttatcttcttctccatcatgcctctgggtggcctattcacctcgtacatgaagaagagcactcgtcgatatgttgcatctcagaccttcaccaactcgtaccctcgactcgagttccacgacaagattatgtcttatcttctgtgggtctgtgtctttggtgccaagctctccgagtcctactacttcctgattctgtctctgcgagatcccattcgagatctttctcagatgaagatgcgatgtttcggagagaagtggtttggtgtagagtaccatgacgctctctgtaaggtgcagcctcagattactctcggcctcatgtacgctaccgatctgattcttttcttcctcgatacctacctctggtacattatctgcaacaccattttctcggtcgctcgatccttctatctgggtatttccatttggactccttggagaaacattttctcccgactgcccaagcgaatttactctaagattcttgccaccactgatatggagattaagtacaagcctaaggtgttgatttctcagatctggaacgccattgtcatttccatgtaccgagagcatctgctggctattgagcacgtgcagaagcttctctaccaccaggttccctctgaggttgagggtaagcgaactcttcgagctcctaccttcttcatcacccaggacgatcatgcctttgagaccgagttcttcccccgaaactctgaggctgagcgacgaatctccttcttcgcccagtccctgtctactcccatccccgagccactccccgttgacaacatgcctactttctctgttcttgtgccccactactctgaaaagattctcctgtctctgcgtgagattatccgagaagacgatcagttctctcgagtcactcttcttgagtacttgaagcagctgcatcccgtcgagtgggactgtttcgttaaggacaccaagattctggctgaggagactgccggctttggcgagggttctaatgacgacctggctgagaaggactctgacgaggtgaaggccaagattgatgatctgcccttctactgtattggtttcaagtctgctgctcccgagtacactcttcgaactcgaatctgggcttctctccgatcccagactctgtaccgaactgtgtccggtttcatgaactactctcgagccatcaagctgctgtaccgagtcgagaatcccgaggtcgtgcagatgtttggcggtaacaccgagaagctggagcgagagctcgagcgaatggcccgacgaaagttcaagttcattgtgtccatgcagcgacttaccaagttcaagcctgatgagatggagaacaccgagttcctcctgcgtgcctaccccgatctgcagattgcctaccttgacgaggagcctcctctcaacgagggcgaggagcctcgacttttctctgctctgattgatggtcactgtgagattctcgagaacggccgacgacgacctaagttccgaattcagctttccggtaaccccattcttggtgatggtaagtctgataaccagaaccacgctctgattttccaccgaggtgagtacatccagctgatcgatgctaaccaggataactacctggaggagtgtcttaagatccgatccgtgcttgctgagttcgaggagctcaacgtcgagaacgtcaacatgtcgccctacactcctggtgtcaacaacaagaccccctgtcccgttgccattcttggtgcccgagagtacattttctctgagaacattggtattcttggtgatattgccgccggtaaggaacagacgttcggtaccctgtttgcccgaactcttgctcagattggtggtaagctccattacggtcatcctgatttcctaaactcgattttcatgtgtacacgaggtggtgtttccaaggctcagaagggtctgcatcttaacgaggatatttacgcaggtatgaatgctctgttgcgaggtggtcgaatcaagcactgtgagtactaccagtgtggtaagggtcgagatcttggttttggatccattctgaacttcacaaccaagattggtactggtatgggtgagcagatgctttctcgagagtactactaccttggtactcagctgcctcttgatcgattcctgtctttcttctacgcccatcctggattccatatcaataacttgctcattatcacctctgtgcagatgttcatgattgttatgatgtccattggtcctcttgctcacgagactaaggagactatctgttggtacgacaaggacaagcccatcactgatcctcagactcctgttggttgctacaacctcaagcccgtcctggattggattcgacgatgtgttctttctatcttcattgttttcttcatctctttcgtcccccttgttgttcaggagcttaccgagcgtggtgtgttccgagctgctttccgatttgcccgacatttcatgtctctttcgcctctgttcgaagtgtttgtttgtcaggtgtatgccaactctttcatcaacgatttggcctttggaggtgctcgatatattgccaccggtcgaggtttcgccactgctcgccttcccttcagtgtgctctactctcgttttgcaggtgactccatttaccttggtgctcgatctacgctcatgcttctgtttggtaccattgccatgtggcaggctgctcttctgtggttctgggtgactctgattgccatgtgcatctcacccttcgtcttcaaccctcatcagtttgcctggaccgacttcttcattgactaccgtgacttcattcgatggctgtctcgaggtaacgccaagtggcacaagaactcttggattggttacgttcgattgacccgaactcgaatcaccggttacaagaggaaggtgcttggcgatgagtctgagaagggtgccggagatctgtctcgagctggaatctccaacgtgttcatcaccgagattttcctgcccctgattgtcgctgccttctgcttctgtggtttcacattcattaatgctcagactggtgttgccgagcccgtgattgtcaactccattctgcgaattgtcatttgcgccattggccccattgtcattaacgccggtcttcttctggtgcttgtgtgtatctcttgttgtgctggtcccatgcttggtctgtgttgcaagaagactggtcccgtcatggctggtattgcccacggtattgccgttatcattcatctcatcttcttcgagctcatgtggttctttgagggatggtctttcgtcaagggtctgtgtggtactgttactgcgattgccatcatgcgacttatcttcaacattctgaccattctctgtcttacccgagaattcaagcatgaccatgccaaccaggcctggtggactggtaagtggtacggcgctggtcttggatgggcttctatttcccagcccttccgagagtttgtctgtaagctcattgagatgtcactgtttgctggtgacttctacctgggccactggctgctcttcttccagcttcctgtgctctgtgtgccttacatcgacaagtggcactccatgatgctcttctggctgcgaccctctcgacagatccgacctccgattttctctctgaagcagaaccagctcagaaagcgaattgttaagaagtatgctaccctctacttcatcattctgatcatcttccttgtcgtgctgattgctcctgctgttgctggccccactatgagcatggactctctcgagtctctggccggtggcaaggctgataacgactccattcaggacactaacattctgaagggtcttatccaggtgcgatctcagaaccagaacgatactggacggtgcagcactggtaacggtactgagtgtctcctgcctactactggctcttggtctacccatgtgtggtggactttcaccccctcccacaccacatcctactcgaccaagccatag

SEQ ID NO: 124 - DNA, 5652 bp, Zygosaccharomyces rouxii
atgtcatacggtcaaccgaaccacgaacaacaagtcccgtatgaggatgaaatgggtggttatgctccatataatcaaggttatgcggagcctatgtatgatgagtatggaaatcccatttacccagatgggacttactatgatccaaatgtgatgggtggtgatccatatgcacaatcgtccattggaccttacgatgatcagactatggattaccaatctggttattataatcaacctcgcggtcctgctatgggtgaaaatttctccgattttagcagttatggaccaccaggtactcctggttatgatgcttacggtggtgctggtgcttatacaccatctcagatgtcatatggtgaaccaggatcttcaggagcttcaactccaatctatggtactggcgaaggttacgatccacaagccattgctatggcactaccaaatgaaccttatcctgcatggacagccgataaccaatcacctgttaccatcgaacaaatcgaagatatctttatcgatttgacaaataaatttggtttccaaagagactctatgagaaacgtttttgatcagttcatgactctgctggattccagatcttcaagaatgtcaccagaacaagcattattatcagttcacgccgattatatcggtggtgatactgccaactataaaaaatggtattttgcagctcaacttgatatggatgatgccgttggtttcagaaacatgcagttgggtaaattatctagaaaggcaagaagagcaaagaagaagaataagaaggcaattcaggaagcttcctctaatccagaagagactgaagctactttgaaccaactagaaggtgataattctctagaagctgctgacttcagatggaagacaagaatgaatgagttgcatccattggaaaaagttcgtcaaattgctctttacttattatgctggggtgaagccaatcaagttagatttacagctgaatgtttgtgtttcatctacaagtgtgcttcagactatttagaatcaccattgtgccaacagcgtacagagccaatgccagagggtgattacctaaagagagtcattacacctttgtaccatttcttgagagatcaagtttatggtattgtcgatggtagattcgtcaaacgtgagaaagatcataacaaagttatcggttatgatgatgttaaccaattgttctggtatcctgaaggtatcgcaagaattgtgtttgaagatggcactagattaatcgacatcccacctgaagaacgctatggtcgtctaggtgatgtcgcttggggtaatgttttcttcaagactttcaaagaaactcgtacctggttacatttaattaccaatttcaaccgtatctgggttatccatgctacagtctactggatgtatgttgcttacagtgctcccactttttacactcataactaccaacaactggtcgacaaccatcctcccccagcttatagatgggcatcagcagcccttggtggtacgttggcaagttttattcaaattgttgcaactctgtgtgaatggagttttgttcctcgctactgggctggtgctcaacacttgtcacgtcgtttctggtttttgtgcttaatctttgccatcaatttgggtccgatcattttcgtgtttgcttatgaaaaggaaaccgttcagagtactgccgctcatgcagtggccgctgttatgttctttgttgcggtggctactttcctatttttcgcagtgatgcctcttggtgggctatttacttcctacatgaagggcagaaccagaaaatacgttgcttcccaaactttcactgcttcctttgcacctttgagaggtatggatatgtggttatcctatctggtctggattaccgttttcgccgccaagtactctgaatcttacttctttttgattctttcattgagagatcctattagaatcttatctactatgaacatgagatgtactggtgaatactggtggggtgctacactctgtagacagcagggtaaagttgtccttggtttgatgatagctacagattttattctgttcttcttggatacttacttgtggtatattttggttaatgtgatcttctctgtcggtagatccttctggttaggtatttccattttgactccatggagaaatatcttctctcgtctaccaaagagaatctactccaagattttggctactactgatatggaaatcaagtacaagcctaaggtcttgatctctcaagtgtggaatgctattgttatttccatgtacagagaacacttgctagccattgaccacgttcaaaaattgttgtaccatcaagttccatctgaaattgaaggtaagagaactttaagagctccaactttcttcgtatctcaagatgataacaactttgaaacggagtttttcccccgtaactctgaagctgaacgtcgtatctctttctttgcccaatctttggctactccaatccctgaaccattacctgttgataatatgccaactttcactgtgatgactcctcactactctgaaagaattttactatctttgagagaaattattcgtgaagatgatcaattctccagagttacattgttagagtacttgaagcaattgcatccagtggaatgggactgttttgtcaaagacactaagattttggcagaagagactgctgcttatgaaggtaacgatgaagatgtggaaaataaggaagatgcccttaagtctcaaattgatgacttgcccttctactgtattggtttcaaatctgctgctcctgagtacactttacgtacacgtatttgggcatctttgagatctcaaacgttgtatcgtactgtttctggtttcatgaactactctagagccattaaattgttgtaccgtgtggaaaaccctgaaattgttcaaatgtttggtggtaatgctgaaggtttagaaagagaattggagaaaatggcaagaagaaaattcaagttcttggtttcaatgcaaagattgactaaattcaagccacatgaattggaaaatgctgaattcttgttgagagcctaccctgatttgcaaattgcctacttggatgaagaacctcctgaaaatgaaggtgaagagccaagaatctactctgctttgattgatggtcactgtgaattactggacaatggtcgtagaagacctaagttcagagttcaattgtctggtaaccctattcttggtgatggtaaatctgataaccaaaaccatgctttgatcttctacagaggtgaatacatccaattgattgatgctaaccaagataactatttggaagaatgtctaaagattagatctgtgcttgccgagttcgaagaattgaatgtagaacaagttaacccatatgcccctgaattgaaatacgaggaacagaatgctctacatcctgtcgctatcgttggtgctagagaatatattttctctgaaaactctggtgttctcggtgatgttgcagctggtaaagaacaaacttttggtacattgtttgcacgtactctggctcaaattggtggtaagctccattatggtcaccccgattttgtgaatgctacttacatgactactagaggtggtgtttccaaggcacaaaagggtttacatttgaacgaagatatttacgccggtatgaatgctattttacgtggtggtcgtatcaagcactgtgaatattaccaatgtggtaaaggtagagatttaggttttggtaccattttgaatttcacaacgaagattggtgctggtatgggtgaacagatgctttcccgtgagtactactacttgggtactcaattgcctattgaccgtttcctatccttttattttgctcaccctggttttcacttgaataacctgttcattcaattgtcattgcaaatgtttatgttgaccttagttaacatgcactctttggcccatgaagctatcatgtgtagctacgacaggaacaagcctattactgatgttttgtacccaattggttgctacaacttgtctccagttgttgactgggtcagacgttatactctgtctattttcatcgttttctggattgcatttgttcctatcgtcgtccaagaattggttgaacgtgggttgtggaaggccactcaaagattctgccgtcacttgttatctctatctccaatgtttgaagtgtttgctggtcaaatctactctgctgctttgctaagtgatatgtctgttggtggtgctcgttacatttctactggtcgtggttttgcaactgcacgtattccattctccattctttactcaagatttgctgggtctgccatttacatgggctccagatccatgatcatgttgttattcggtaccattgcccactggcaagcacctttgctatggttctgggcttctttgtcatctttgatgttctctccatttatatttaacccacaccaattctcatggcaagatttcttcttggattacagagatttcatcagatggttatccagaggtaacagcaaatatcatagaaattcttggatcggttatgtgagaatgtccagagctcgtatcactggtttcaaacgtaagttaatcggcgacgactctgaaaaatctgctggtgatgccgctagagctcacaggtctaatatcattctttctgaaatcatcccatgtgccatctacagtgctggttgttttgttgccttcacatttatcaatgcccaaactggtgtgagaacaactgatgatgaccgtgtgaactctactttgcgtatcattatctgtactttgggaccaattgttgtaaacttgggtgtcctagctttctgtgcgggattatcttgttgctctggcccattgttcaagatgtgttgtaagagtagtggttctgtgatggctggtgtcgcacacggttttgcagtaattatccacattgtattctttattgtcatgtgggttttggaaggtttcaatttcgctagaatgttgatcggtgttgtcacctgtattcaatgtcaaaggttgatcttcttattcatgactactttcatgttgtcccgtgaattcaagaacgataggtctaacactgcattctggacgggtaaatggtatggtatgggattcggtgctatggcatggtcgcaaccatacagagaattatgtgccaagactgtggaaatgtctgaatttgctgcagatttcattttgggtcacgtaattctatttgtccatttcccaattttattgatcccacagattgataaattccactccatcatgttgttctggttgaaaccatctcgtcaaatccgcccaccaatttattctttgaagcaaaaccgtttgcgtaagcgtatggtgagaaaatacagttacttgtactatggtgttttcattctattcgccgcatgtatcgtaggtccagctgttgcatcttcccatgtttctaagactatcggttctagtttaactggtactttcaagaatttggttcaaccaagaaatacatccaataacgataccggtaagcaaatgtccacttatgtgagtcactggtttacttctactccttctttgaagacgtggtccaccaagaaataa
